United States Patent Application Publication US 2024/0065297 A1 - sequence listing, part 5

SEQ ID NO: 13 - DNA, 1686653 bp, Pichia kluyveri
  >NCYC246_000002F P_kluyveri_NCYC246_TS
cccctgcgacctacttcactataccccccctgcgacctacttcactataccccccctgcgacctacttcactataccccccctgcgacctacttcactataccccccctgcgacctacttcactatacccccctgcgacctacttcactataccccccctgcgacctacttcactatacccccccctgcgacctacttcactataccccccctgcgacctacttcactataccccccctgcgacctacttcactatacccccctgcgacctacttcactataccccccctgcgacctacttcactataccccccctgcgacctacttcactataccccccctgcgacctacttcactatacccccctgcgacccccccctgcgacctacttcactataccccccctgcgacctacttcactataccccccctgcgacctacttcactatacccccctgcgacctacttcactataccccccctgcgacctacttcactatacccccctgcgacctacttcactataccccccctgcgacctacttcactataccccccctgcgacctacttcactatacccccctgcgacctacttcactataccccccctgcgacctacttcactataccccccctgcgacctacttcactataccccccctgcgacctacttcactatacccccccctgcgacctacttcactataccccccctgcgacctacttcactatacccccctgcgacctacttcactatacccccctgcgacctacttcactatacccccccctgcgacctacttcactatacccccccctgcgacctacttcactataccccccctgcgacctacttcactataccccccccctgcgacctacttcactatacccccccctgcgacctacttcactatacccccccctgcgacctacttcactataccccccctgcgacctacttcactataccccccctgcgacctacttcactataccccccctgcgacctacttcactatacccccctgcgacctacttcactataccccccctgcgacctacttcactataccccccctgcgacctacttcactataccccccctgcgacctacttcactataccccccctgcgacctacttcactataccccccctgcgacctacttcactataccccccctgcgacctacttcactatacccccctgcgacctacttcactatacccccccccccctgcgacctacttcactataccccccctgcgacctacttcactatacccccccctacttcactatacccccccctgcgacctacttcactatacccccctgcgacctacttcactacttcacatctacttcactataccccccacctacttcactatacccccctacttcactacttcactatacccccccctgcgacctacttcactacttcactacttcacttcactacttcactacttcactacttcactacttcacatacttcacatacttcactacttcacactacttcacttcactacttcatctacttcactatacccccctgcgacctacttcactataccccccctgcgatctacttcactacttcacttcacttcactacttcactatacccccccctgcgatctacttcactatacccccccctgcgacctacttcactataccccccctgcgacctacttcactacttcactatacccccctgcgacctacttcactacttcactatacccccctgcgacctacttcactataccccccctgcgacctacttcactataccccccctgcgacctacttcactataccccccctgcgacctacttcactataccccccctgcgacctacttcactataccccccctgcgacctacttcactacttcactatacccccccctgcgacctacttcacatcactataccccccctgcgaccacttcactacttcacttcacttcactataccccccctgcgacctacttcacttcactatacccccctgcgacctacttcactataccccccctgcgatcctacttcactataccccccctggatcctacttcactatacccccctgcgacctacttcactatacccccccctgcgacctacttcactatacccccctgcgatctacttcactatacccctgcgacctacttcactataccccccctgcgacctacttcactatttcatgtgcaatggcaaaagctactaggtgtaatcacgttaaaggttcaagagataagtatatgatggagactcccttttatttagttcatagtgatctacttgttttgagtttcaagtattcaaaaggtggaagtgtggcaggttcagcgttacgttatatagtcacttttttgtgtaattatacaaaatttaatgtttgtttttacttaaaagataagtctgaagttgaaccttcattccgcaaatattgtgcctatataaagaataagtttaaggctgatatctcctattttcacaccgatatggggagagaataccaaagtaatagtctgaaagaatactacagaagcaatggtattactcacatcacaaccaatggttacgcatccatggagaatggtttagctgaaagatttaatagaaccattaggaacgatatgagaaccaatttggtagaatcaggtatagataatagattctggccagacgtaatggaatactcttcaatgattagaaataagttaattcctaagaataaagataaatctcctgaacaaatgataatggaacattatttccctggtacaggtagaaagcagttcatcccacatgtgtttaaaagttttggcagatatggaatctggctagatgcttctaagaaggtatcaggattagagatgcgtgcacatcactgtttttatcttggtccttcggagtatccttgtgcagatgaggcaccagttttaggtggtgataagatcctagtgtatgaaaaacttaaggatggattataccatgccacaataaaacacacaagaaatgtgaagtataataaacctgttaggttatttaaggagatttcattggaaaactttggtatgaagagagcttcagtaaaagaaactgaagtagatttcactgataagtatggcaaaactatggcagaagcagatttgggcaaagaagaaattgattttccagtgttaccaaaatactatgtttatgaaactaacaagataaacccagaattaagtacacctaaggacagtgagtgtgtcgtggtaggaaacaaagatcatatggtaccaaaagaagttacagttaaggaagcagacattccattgaatatggggggagatagtgttactactgacatcaatgatagtggaaagaaaaatgacactagtgatgaagacgtagaaatgacagaagacaaagataataatattgttgaagaaaccaaagataaggatgacgacaatatcgaagcaagtgcaaatgataataaagaacaaacatctgatatcacccatactgtaaatgtagcagaaaatcctaccagaaacgagtctgacgagacaatcattgataaagatatatccaacgaaatgtctggcagaactgaacttaatgatcaggaaaactccactacatcactagccaatgaagagacgacagaaaaggtcgatgacattgaagtagaacaatttaccaccgaagatttaaagcgcagagaagagttcgaacaatccgtcagagaggacgatttacataaaacgcttgaattgaatgaaaacaatattgttgaatatgaagtcgacagaaccttgcttgattcggacaaaccgcatgaaacaataaagctacctgaaggaagattactccgtagcaagttttcaatgaagtccgtcaacggaatcatgaccgttgccaatatcagcaagttaccaagggaggacccgggcccaaatcgaatcatataccaagttgtttgtcatgatccagttgaaggacctgcctggagagcagcacatgatgacgaattagagtctcaaatgacaaaacactcttgggatgtagaacctattataactagtgacccttatatactacagagaactgtgagtatgcaaatagtatgctctgaaaagagacctgcagatatggggggagaagctaagaagaaagtgagatttgttatgagaggtgataaacaggataagtctacctataaagaaacttacagtccaaccttaccttatgacatgctaagaatgattatagcggagtcggtacaaagcaatagatacatagaaatggtagatatatcaacagcatatttgaacgcagagattgactgcgaagtatacgtcgagctacctaaacacctggaggaaagtaatgttaaattaaaccatggtgagaaggtggtgcatcgagtaagaaaagcagtatatggactgaaacaatcaggattcttatggtataaaacgttagttaagtttttgatatcaataggatttgaagaacgtggggatattccttgtgttctcgtcaaacctcaaaagaaaaggaaagataagatatccatcatcgtgggatttttcgtcgatgacatgattgtttcagggacatctcaaaatgaggttgataattttctatataagataaacaataggtttactttaagaaagacatatgctaataaattaggtttcaaagatattcttggtattggagtcagagaaaacagggacaagaggagtggtactttactctcgatggaattaagtttggagagttatatcactaaattggtggagaatctaggaatgaaggaagaatttagctcccaaagattcatttctacaccaatgacacctggttttcattttgatctagaaaaggaagaaccaatggaattatctggtaaagaattagctgacgaaatccatttctttagagaagttgttggtgcattacagtacatatcattaacggtgagaccggatattacttatgcagccaactatatggctagatattgcttatgtccacatccaaaacttaaaagggaacttcttagaattgtcaggtatgtgtatcaaactcgtagttacatgattaggtatactcgatacctatcagatttggttcaggatacggatagactgatcacctactccgacgctgatcatgcgggagatccggtatcgaggaaatcgactttatctgctgtgttcatgatgaatggaggtccagttgcatggtttactagagtagctaaattcatggcaacatcatcaacagatgccgaggtggcggcaatggtagagagtggcaatggattgacccactaccgtgaagttttaacattcctaggagtgcttggtcctgagtactctagaaaagaagaatattttatcccagagtatagtagagctacaaaagtgggtggtgccgttaatatgaacgaataccgccgtcttcgaccattattagttatggttgataacacagctgctatatacttggcacaaaagggtactaccagtaatagatctaagcacatgggtattagggtggcccgtgcaagagacattatggaaaatgagcatattgtatacaaacatattggtacaaaggaaatgttagctgacattttgaccaagcctgtcactgctgaagtaatgaacaatatcttaccaaaaatcatggttactggaacatctaaagtgagacacatctagagctatatgcaatttaagaattatacccgtgactatgcacggaattactgattactgatattttgttaaaaccaagttagtttaagagcaattgtttattatcgattttgaattttactaaactgaatcactgtcatatttgctgttattaagaggatgaaagacactaatatatattgattaacttattgtttactgttattttttatttattttattttattttgttctataatttcttgtacgcgaacttagtttgcattatttgatttatatttgattttatatttgaatttaatttgttattcttatttacaatgtttctttctggcaatgttccaatccttacagcatttggtggtgtgttaagattaggtaatacaaagtcggttatgttctggaattgaggaaaccactcgctacatggaaatcttgggattaacaaatgttgcggtacgcaatttatcgggattagttttccgtgataggaaagtgttatatggtcttatctctttccataagtttctatcgaactatgatcaattgttgggtgcatacatgaaacatgtttgaccaagattgtcccgatatcagcaatgatagggataattagttttggtctctttaacccgattggctgattcaattatcagttcggtgtaattatgtttcacatgaagaatcaggcaaccattaattggagagataataacccaactacacaagatatcggggtttattcgggattgcagataagggaaatgcaagtaaggaatgaaacgcccgaaagcaaaagtatataaatataccctattccgctagtcgttgacacgtctagtgaagagctttgttgagaagtcctttatagaacatcgaaagatattactatctcagagatacaactataacaatctattaaggaatccaaaggctaagatagtttcaacttatatattttagcttacataatcatttatttatttcatttataagcgactaatttaattttatttactcaaatctgaatatttgagttctttcttgtattacttcttttcagcacaagtattgtttggtttatagacgtggctatactgattacgcaggtccatttacacagaggtgaggtataacatacactcttcccgttgttgatgggatttgatgtcatgttttgcaatatttaactacaataaagaggaaattataaattactatcaattcttctagttctatctccattgatatatatctgtattcatagagtggattggtaaccttaggagctgtaaatagtgcgtttgataatgcactttgtcttttcagctgagatatatggaaaggtgagcttcgtttagaactactaggtaattctagttcataattgactgcattaatttttctaatcactttgtatggacccacatatttggatttgaatgcttgtactaaatttctgttatggacgtcacccggtttagctaatgcatcttgtgggatatacacatcatccccttcttctaactctccttcttttttatttgcatcaaatatagctttatttgtttccaatatcaaatttctagcagcacgagtagtgatttcgtatttttcaaaattttctgagatttcatctataacccttcctttatcagataattgatagcttaacgtcaatgatgaatgtgggatataaccaatatcaacttcgaatggtgataaaccacctaatgccattgatggtgttgattttaaggtgaattcagcagctggaatgtaatatgtccaatctttgttttccgttacaatggatctcaagtaatgtggtaaagaacgtatcatacgttccgttgctttgatggtgattggtaatgcattaaacttttgactgcattgtagggctttgcataaattcataaatatttcagctctaaattgaggacctctatctgatgtattaacttctggaattccgtgcaatggataataaatttcaagtaaatatattttgaaatatcttctccagataacttattggaaattgggtaaaagtgcactctatttgaaaaaatatctaaatttaccaatgctgaatctacctctctaccttgaaaatttgttgaagtaaaccctgatacaatatccatgctaatatgtgaccatctagtaattggaatagtgggttgctgcattaatcctaaagtcctgtttggaggattgcaggttttgccactttcaacatattcttcaataattgggaacattcttggaaagtaaaaatgtttggataaccatttttgcattcgattaatacctagtaataagttttttaaaagagatgttatcacttatttaaaactagtatatattgtatatagtttatgtaatgaaacaaacaatacttgctcaatatagctataaattttataatcaaccatatttataattcccataaccgttaacattatttcagataccattatattagacattaatcttcttttttttatcattctcataatagattggcacactttataatagtaatcttgtttttctataaatcattcttataagattcacaattaatacaatcaacattgtttatttcagcatttaaattaatttgaacagtgtcgagtcaggttttgtgaacagataaattgcatatacttaatgtgaatatcaataaatattattctcgtcgtttttgcagagtttatgatttgatgaactagtagttttattatcatttgttaatgctttataataattcccagataattatcacctacaattttttttgattcaccattaacatttttgtggtttatcgtttaaatcctcaactcttttggttaatagaatataatcttttatcatgttgtatatcgatttattgataataaagttaactggtaaagttattaaaattattcaaattggcaacatatgatattcagtaatgtacattaaggagcaaaatggtgaatgaaaaatggtttatgatgagaatgaaagccattgtagttagcatgtgacatattacttcattaatttcatattatattctgaagcttgttgcttttttattttgattcatattcccatattattataattaattcttaaatttttaatcatataatcaagcatattttttttctgattttttaaactaaaattataaccttatttaaaatcatagcctaacattattatgtttaattcttaaattttaccatattaaaatgtccatacgttatatggattcattaattcaaatgtttaatcagacatataataattcttcaaactgatattataatctagcatcaatttatacttttgatattatattgtgatctaatattaatattaatattctaatttatatcacaatcaagctctgacatattatttatcacagtagaacctaccttctgaaactcaatttgtttactattttgattattattataaataaaactcctaatattccatttatttatcaattatcttcattgattaagtattcttagttattattattcatcattagaataaaactttcactattaataactaccctactactttcgttataacagtgtcttcaacaaactggctgaaaagtaatgattcatttatcaaatactaaactgcaatatcactaacctgtatgataatacatttgattgttaaagttcatatagtttccaatgaatgagtatgttaaatctttaaaagaagctagtaatataaagttgtttgttataatgttaatcttgctgtagttgaccctaacaacctttaataaccaccattttacatacccgagaacctaacatcatcaaaaatcagtaaaattccaaatatccgaaaaaagggtacttttctcaaaaaattattttttcaatggattaaagaatatccttagataagctatgacatagtatttgttgcttattattgatagtttcacaatttgttaacattttggccacttttaagtagtttgacattgaatatagttgatattagttattagaaacacttaaagatgtattctagctacttatttatagtgaaaagtgtttatttcaagcatttgaaaacattggattttcatggttttaaatcattttaatatttctgagtactttaactaccaaatttcattttcttaatttttaatataaacatatattaaaaataccatcaataaaaagagaatcaaaaagtaaatttataccgtttaaatgtaaaagatattaatagctttgtccttaaagataagagtaaaacatgtaatttcggtataattattttgatgagccgccgttaatttatttaacgcgtagaaaaatcagtgatgagccttcataattaatgatgttggatacatggtatatataatagagagttttatgcagagccttgagttgtaacaatgattgagtagaaacaggaagagaaaagattaaacaaatcagaagaagaagaagaaacaaagaaaaaaagaaagaaataaaagaaagataaagaaaaaggaaaaggttcatcaatttaaatgctcatccttatcaatttgagggctcatcatagcattcttatcaataaagcccctgaatctatgtaatcacattcacttgtatgtacgtatgactttgactaaaattaaacaactagtttgaagtttgttttatagaagagagaaagaacgattataaaaagattgttactattataattattattgatttgaaactatcctttaattaagtttcaatactaatataataaagatattttgcttcatggaataaaagaataaatttcaccattaaaatcaatatcgttaccctcttcattatcatcagtactattcatgtcttttaaatttggcttatcatcatcgttatctttgaagtttgtcttatcaacagttttagataattcattaattgaatcatctgatgtttgacatattaagtaacaggttcatccactttgttgattttttcttttggtatcattgaatcagcggatgaaggtatagatccaactggttgacgtttcagtagtataaatcataatttttttaaaattaattttgacaaaactatattccatatagtatttctcctctttaatagaatgttttttggtttttatttgagaggaacaatattatactgaatatggttttattgatttttcttcaaatgataaaaatctattatgatcatatgtattacaatcgtacaatgtatatttcattatgtaagtatgtatttatgtaggtaagtaaatgaaatagaatacaatcaataactctatgaagtttcaagaacaaagacaatttcaaacaaagggatatatcatgtctttaaatagtggaaatggtaagaaaaggttaagatactaacttaattaggaaactgatatgaaatttaacataatatatttcttatctctctttgataaaggtattagtggtgtatgtcatttgattattctattacaatgaactatataaacttttccttatacaaaatgaatctggtttaatactctttgtaactatattatctaatgtacaaattacattagaaattataatgttctctatttgttgaacttccatatctctctgtaaaacaacacatgagtaatatcaattcaattgcaagaaaatatgaaaagatcttcattatttaaagaatatcttgaagagttggatcgtgaagagtctccaaagaatcaaatttctagatatcttcttggtttaacccctgaattgaaaaagatggtatctcaacaaaaaccacataccttaaatgctgcaattcattatgctgaagagtcacaagatatattgaaggatatagaaaaatcaaaaccaacaaatccatggattaatattattgaacatccaacacctgttaaatgttcttactatcgtccataccgtttcaatgaatttaaacctggttttcattataagaataaatttttcagaaataaaaaaccattcaaacgttataatccaaactttactcctattggtaaccgttatatgcatttttctcgttcttctagcaacctaaataataaattgtcttataataataataacagttctttttcttatattgattcttctgtttcatgtatggttacatacagagaccggtattatgtttcacttcttttgggagttgtagaaagtccaaaatcttttgataatttaaagtgtagctatgaaacttacgaagctgcatgtaatgcaaagggtcttataggaaatgatgatgaatatattcaatgtgttagaaatattagatgcactcctgctagtctccgttcatttgttaatatgttactgaataataattgtattgtggatccatctaaatttattacggaagttcattttcatttgacaccaaactgaagttgatcatttagtataatcctttcattagttgaaacatgataaatatagtaataataataaaataacaatgacaaagcaattaagggaaattcccacttccaattacccacacacaacaccaaacacccaactaccctccaaactcttcaactaccctccataacccctacccttatcaaaatgaaagaaagcaaatatatcgtataagaaatcgtataagaaagaaggaaaggtccagaatcaattaattatatttaattatcacactattaaaaacacgcgttaattaattttaattttataacagtttcttttcttttcagtttattctctgtcttctttctgtctttctttctagaggtaatcacagtatggttaatcagagatacaagactttagtgattcaagcatttgcaattctaggatttattttgatcttatataaattagcaaataggaatggaaatagtatatcaagtccaccaaattatcagaaattggcagaaagtttgaatttcaaaaataataacaataataataatattgatttaaccaatggtatatcatttggtactgatccatttctgggtaaagaattattaattaaacaatatcaaaaagctaatgcaacaattatgacattatgtgaagaaagagatttaaagggagttattgaaactgttagaaaattagaggatagatttaataaaaattatcattatgattgggttttccttaataatgaaccttttagtgatgaatttaaggaaaaagttagtaaatttgtttcaggtaattctagatttggggtaataccaattgaacattggtcatatcctgaatttattgataaggaaaaggctaaattagagagagagaaaatggaaaatgaaggtgtaatttatggtggtagtgaaagttatagacatatgtgtagatttaattcaggtttcttttacagacatccaattatggaagaatataaatattattggagagttgaaccacatgttgaatttacttgtgatattaattatgatccatttaaatttatggaagataataataaaatttatggatttacaattacaattcatgaatttttacgtacaattgaaacattatgggatacaacaaaaaaatttattaaaaataatccatcatatttaccaaatgataatttaatgaaatttattagtaatgataaaggtgaaagttataatttatgtcatttttggtcaaattttgaaattgctgatatggatttttggagaagtaaagaatatgaagaatatttccaatttttagataaaagtgggggatttttctatgaaagatggggggatgcaccagttcattcaattgcagtttcattattcctaagtaaggataaattacattttttcaaagatattggttatcaacatggagtttatcaaatgtgtccaattgaagataatttatataatggtaataaatgtttctgtgaaaaggaaaatgattttacatttgatggttatgcatgtggtaaagaactattctctgcaatgggatggacaaaacctgataattgggaaaaatatgctgattaattgtataccattctatataatataataacactattctattctattctattaaacacggaatttaaaagaaaaaagaaccttaacgcgagagagtaaattttcatttatggaagtcttagtattataaggtgatctgttattattgttattattattatcttgatggttttattcttttgagtagttaggtatatagtatcacaatgcatctgttgagaaggtatcgttcacttgttttatacgtgtctgtgtttttagttgttataatcataacgggtagtgcattacattcacaaaacagaacagaaattagtgatttaagaggatatttatataatcaaggagatgataaattaaataatgttgtagtagagaaggaaactgcggaagttaaggaagagaataaggagagtaaggagagtaatgataatgataatgataccattgaaaaaaccaaatcaaataaggaattatctgataaatatcaagaagaagcagaaattgagaattatattgaaaaagtatataatgaagatcctgatacatttaatgaagatatatcaaaactgacagatgaagaaattgcagctcaactgaaaaatattaaggaaaagcaaaaaaatgatgaattattaaagaaacaacaacaatcaatttctaaaataagttcacaaggtgataatgttgaaggtacattaattgataatgaagatagaattaggaaagatataactcctgataataaaccttggtcacaatatgaattagagagaattattaatatcaatgaaactaatatatcatcatataaaagacaaaatgcaacattatttacattatgtcgtaatagtgaattatattcaatgttgaaaactattcatcaagttgaatcaagattcaataataaatttggttatgattgggttttccttaatgatgagccatttagtaaagaatttattaatttaacaagtaatatgattagtggtagagttagatatggattaataccaagggaacattggagttatcctgattatattgatgaagataaggcaaaagaagttagagagagtagaaaatgggcaagtataacttatggtacaagtgaaagttatagacatatgtgtagatttaattcaatgtttttctataaacatccaattatgagagaatatgaatattattggagaattgaacctgatgttaacttccattgtgatattatggaagatccatttaaatttttaaaaaatgaaggtattaaatatggttttacaatttcaatgagagaattacataacacaattgaaacattatgggaaacaagtaaaaaatattttaattcattaaataaagattattttagtaaagaagttgataatttaagtgaatttataagtgatgataatggagaaacttataatttatgtcattattggtcaaattttgaaattgcatcattaagtatttataataatgaaatttatgaaggatatgttaattatttagataaagcaggtggattcttttatgaaagatggggggatgcaccaattcattcaattattttcagtttaatattgagaaaagatgaaattcatttatttcaagatattagttatgaacatacagttggtataacatgtccattaaaagattcatttcgtcaaaatgctaaatgtacatgtaatccagttactgataattgggttttaacaagtgaaagtagttgtaatattaaatttattgaaattggaggagctaataaggaacctgaatatgaggaatatatgagaaaaattcaagaagaacaaattgctaaaaataggttaagagaggaacaaaaacaattaagagctgaaactgctagaagacaagcagaggcacgtagaaagaaggcagaggagagacgtaaggcaagattagctaaacaaacggctaataaaggtgtataaaaggtgtatataatgcataaatagtttcatgaacattaaaatataagatatgatatgataaatgtattctgttttacaataaaattaattcttaatataaacactatacataatgtcctgctaaattaatagttgataataaaaagttgtatgtggattatcaagaattctagcaaaaaaatgcaactaccagagcattagaagttttcttgcttcaatctttgtaaacaaaaaattaatgaatgatattgaaactaaaagaaacaatcccaaaaaaaatgtttacgatacttttgttgatggtaaattctgtgattcatgtcgtccaaaaacaactgataaaacctttcgtttcaatttagctttcttcactgatggtgccaacctttttaacaaaactcataaaagtgtcaatgctcaacttttattagtccttgatttacctgatcatgtcatgaaacataaagaattctctttcacaccatttttttatcaatcaagagctaaacttcctggttataatggtgaagcttgcaaattgttgtttaaagatttggaagacctgcataataacggcatgaagattactatagaagacgttgaatatactatttatgcagatcttgttgcaatagtttccgatggtttagcaatgccttatttttttgaatccaatggagttggagctaattacccttgtgtgttttgtaagcaaacaaaaactgatggattgaatgcacctggagttattgaatatattgaaaatcctccatcttataaaatttttgaagagaaaaaatatacaagagatggatttaatgcatctctcatatgcaaatttattcaaaagaataatgatggttatgactcatactagtttttataaaaaaaacccaacctataaacaaatggttgaggataggttcaaatatttaaatgatgtgttaataaacagaaagttttttgttgatagaaacaaagggaattcaaatataatgctggatagtaatatgaaagctatagattccaaaatgttttctcatgttttacctatgtatttcaataaacaagattatgacgataaatctttatatggcaaaataataaattggttagttgagctgaattcattcattattgtaatggcatccgggaaattccaaataatttttcttgaagacaagaatagcaagaatttattaaaagaatcttacattcatttattgaaagaaattgagcagttttttagagatgataaaactaagaatgaatttgttcagaatataatttgatcaaccaacgcacatgatgattcatgcatttgaaaaaattaccaatataaattcatttaatttattgaataaaagtgttctgcagctgcactatcatataaatcatcggattataattttgttcaatcagttggaggaagaaaggtgcaagattctgataatgtgaaatatatatatatatatatgtatagagaatttaaaagaaatcatcacattcctaatgtaacagataaagaaattaaagcaaaaagacttaaatctattaaattaagaaacacaaaaattagtcttttgggcaatgccaataatattgaaccatatggtaaaattagaagagatggtaaattgtgttttataaaattcaaaaaaatgatcaggtttgaatatgatctttctttgttcaaatatcagatgtttatattcaaaaggaatggagaattacctcttccaaatcgaacattgtagaaagacttttataactactgaatcaccattgactaattctattgtaatagatgaacatctgataaatcagcaatagaactacttaaagtccaaggccaatcaaccagacgatgcaacaagaagaagtgactgtacataatttgccacccaatttgccaccgaatgaaagtcaaataaaataagaaaataaaataaaaatgagaaaaacccggtcgatgcgacgaagttctttttttagaagttttttcaatttctttttctttgtttacattacattatgttaagtgaagagaagttttccatttccatttattattgactatcatgatgttttatttttattagttttctattctcttattctcttattctcttattcttctcttcttttactacacacaatgtactctcatattgcaatcatcaccgctattgctgctcttgcttctcctgttgttgcaactcctcctgcttgtctcttagcttgtgcttcctcagttgttagaagttcttcaacttgtaatcaattaaatgatattgattgtgtttgttcaaatgaatcaaatgaaatgaaaaattgtttagattcaacttgttcaaatggtgattctgcaactgcttattctgctttccaaagtatttgttcaggtatgggtgctaatgttaattcttcttctgcttcatcatctgcttcatcatcatcttcatcatcatcttcatcatcatcatctgttgctccatcttcatcagcagaaccatcaacttcatcagcagaaccaactacatcatcagttgaaccaactactaccgttgaaccaaccacttcatccgtcgaaccaaccacctcttcaattacttccgtcgaaccaactaccacttcaacttcgtctgaagctccatcatcaactttaaccaccacttcatcatcatcttcatcatcaactccaccaattgttactttaccatcatctggttttgcaggttcaattgaagttaatggtgctttaggtatggttgcaattgttgcagctttattataattattatagctttagagtatcatagattttagattatcattcattatcgtagaattatttccccaaaaaaaaaaagaaaaacaaaaaacaataaacaaaaaatactaaaagcaagatatatcatatctttaaagttaataccctactcattctatagtgattcccatactactactactactactgttctttgttttattttatatttatatttatacttattaacctctctcttaactaataattattattacttcaccatactcaccgcgagtttgttattgtttttgtttcatgattagttcccttttgctatacttctacatcttccttcttttgaacaattcttactgtagtaaaggctttgctagaaactatctgaattattatatactatctaaattaccattagtactctatatttgtattggatattactaattcttaaaataaattcataatattagctattctttttttttgccttatttttaacaaatgtttgataaacttaatatggatgaatatcttgacaattatcaatcaatgatgaaagaaataccattcaaacatggttcaatgaaaggttatattttaaattacaagaaattaattaatgataatcatgattatgaggaagtattacgtgaaaatgttccatcaaaatttaataaatatttttcaaaacctttatcatcatcatcatcatcattatttgataatactttaaattctgaaattgaaattggtagatcatctaaaatcaatttaagtccaactaaaaatcataaagaaaatggtataaaggaaagttttattgatgataaatttatttcaaatataaatcttccatttaatgataaaagttcaaatgatgatttaaatcttgactttaatatagacaatgatgacttaaatgatactatggatttactaaattcaaaaagttatgttaataataatttaagtaaattggaaaatagatattatatgaatctggattctaatgaaaagattgaaactaagtataaaaataaggaaaatcttaaaactatagatgaaattgatgaaattgataaattatgtgataacacgtatcgaaaattaaataataaaagtttaattgatggtgaaggtaaagaattaaatattttaattcaaggtattataaataaattaaaggatataaataatcaaaatgaatcattaaattctcaaaataaatcattgaataataatttaaatgaatctaaattgattattaaagatcttaaacatttaattgataattataaattaaaattaaagaaatattcattagctttacaacgacaaaatattaaaaattctaataattttgaatcaattgataattttaatgatgttaattcaatagataaacaaattcaattacttctggctaaaaagaaatcattacaagaaagaaaatctattccaaacactaatacttctagtaataatattgatatttccaaactgtcagatgatattgttcaaaaactgatatctcaattatccaatcatgaattcaatcattcaatcaataaagataatactaaagaaagtaaagacgacgatcacgatcacgatcataatcaagatcaagatcaacatttagattgtccattttgtaatgaagatacatcaaatgatcttttctcaagttttaatttaaaattagataataatcttagtcaagatgattttataaataaattagctgaaactttacaacataaattaaaatctaatgaaaagataattgatgaaaataaaaaattacccgttatttggtaatatcattttttaataaattgtataatttgtatagtattaggggttaataatattaaaaatcgggaattaaaattatatactacacacaatttatttaactatttcttacctttcttcttattcttctttttcttttgagatgttgattgttcattattctttactggaacattattaactgtttgttcttcaactattggtaatttttcatcttctttaataatatcattcttattaacatttgataatgataaacttaaaccatccatatcattaccatttatattacaacctctaggtcctaatgcattgataattttggaaaattcttttgatttatgagttttaaatatatgaacaatacctgatttattattaaaagttttaaatttaataattgatctaattttattatcattttttttaacatgtgtataagttattgaaattgttgtattatttggattagattctaataattccttagttgatgttaaatatgtatctatgtttttaatcttcattgttgtgtaccgattctaaaagaaacttgttgatgatagaacgtccagtgggaaaatcatgttgagaaattatcaatatagttgattgaggtcattacgtaagttttgatgatatagtttatgatatgatattatgttatgttatgttttatattatatacatgaaaggtaaatagataatactttatatagaactaaattttatttattaaaggtgaaggaatttcataaccactttcctttaaagattgtaagattttcggtaattcagtacctaaatcacaatttgaattatttaatttttctaatataactttaacaaaattatcatctttaactgatataccttgagttaataaataaaagaatgtatatttatttggtaataattttaaattatttggattttctaattgaattttctctattctatctaaaaattttaaagtttcattaatatttggatttaatgaataaccttttaaaattgaattatataacattgcaccaggtttaataccattaattaatgctttatcaaaataatataatgcatttgttaaatcacctttattagtaaaagatgttaaaatatttgaatatgcaacatcatttaatttaacaccaacattatccataattttcaaaatttgtaaacctaaatcttgagttttataatttttaaataaattagttgcaacaactgataaagttgcagtattaaatttaacattttgtttaatcatatcttcaattataattgaaagtttttcaataattgaatttcttgataaatttgaaatttttgcatttttcattaataaatcaataatttttgtccaagttgcaatatctggtgaaatttcattatatttattattaattaaattatttaataattcatttgcttcaattaattttgattcatttattaatgaagtaaataatatattaaaagtttcaatatttaatttaaaattttcttcatttgaataaatattaaataattcaaaactttcatcaatttttttagttttacataaaaattgaattaatgaacattttaaatttgaatcaaataattcaggtttattatttcttaaatcattaataattaattttactttatcattttgatttgatttaattaaatattgaatataaattgaataagattcactatttggaattaatgaattatttaaaattttccaaattgattcaattttatttgataaattatcaatttttaaaaatgaaaatgcaaataataattgattccaaatttcaatattgatttcaattttatttttacttgagaatttccaaatttcaatacattttgaatataattttgaatgatttaaatatttcatataatatgcaattgttgaaggtttaatttctgaaggtttattttcatataattttaaatttttattaattgtttcctctaaataaacaattttaccatcaactgatgcaattctaataccttttaaactttcttcactattaatatcaaatgatttttctttaaattctttatataatggtaaaataaaatttaaatcattttcaggtatatttaatttccttaaataatttgataaattatataatgaatcagattttttattttcaccataaattaatttaataaattcattatcaattttattttcattattttcaattaatgataataaataagttgataaacctgttaaataataatcattttcaggattaaattttggatttgctgtaaacattgcagatggagtatctttaaaataacctgcattattaacccataatgttaaagcttccatatatctaccatcaattaataaagattcaataaatctattaaaatgactaacatgaagagttttagaatctgataaaatttgaattaaatcttttaaaagtgttgaagttggtgcattaatttttttctctttctttaaattaataattttagttaataataaattaccaattctatttaaacctcttggtgaagttcttcttgcatctgattgataagtttcaaaagcattttgaatttcttcaaacattggataaaattcattatattgagttttgtttatattatctaatttttcaattaatggattaacggtataattatgtctgttatttctattatttctcttttcaacaggtttttcatcaattgattgaattgtttcagttattgtttgagttgattggaatctttgaaatgataaattagatataccagatgacttcaagaaagtcttagagccagagcatacgttacgtgttgatccagataacatttctctcgttggttcaagtaaagtatgatcttgatgtaaccagttgatgaaaaaaaagtattattttccattggacgtagtgatgtttaaaattgagagagtttttcatggtggtaaaaaaaaaataatttaagatctaagatttaaaaaaatatattggacgagaccggagtcgaaccgatgacctttcgcttgcaaggcgaacgcgctaccaactacgccacacgcccagttatacatttttatgaggggtggtttgtgtcgttgtagttgtgtataattacgtaagcacaaattgatgtattagttgctttttagtgttgatacaacaggattttgacagcaaagttgattggaaacatattaagactgcacagatatacttttgatagttgttattgacaaattgaatgatatttttatgaaaaataacatttaacctttttaaggaaataaactaatttgaataaattaaaattacttttaagtaaaatagttaaaaataaaaaaatacaaggaataaagcttttattatcattagaatatagaaataaaaaaatacaatataaatataaatatataaaattaaagaagacattagggtataaatatagttattattcattatcaatatcattaacaatcagtttttcaatttgattattataagtatgataagtaattttaataatttcattttgaggaaatttaattgaaggtatatcaattgcatttgaagccattaaataaccataaaatatacgtataattgtttcatcagctattattaaaacatcatttgataatttttccatttctaaaattaatggttcaatttttaatgctaaatcatgataactttcagctcttggatatctatgatgataaggatcatcaatatatttacaataatcagaattaaatttttcctttaattgatcatttgataatccttcagctgcacctggatttaattgagttaattcaggtctatgtttaactgtacaaccattttctttaaaaatttctgatgattgaatagttcttaatctagttgaagtccaaactattaaatcttttggaatttcattattggggaaatcatttttcaatgtattgaaaattttattaatataatttttaccattttcattaattggtggatcatctttaaaatttaatttatttaatgaacaacgagcaaaataaattgaatgagattttatttttgcatttaataaataataaacaattttagttgttaaaaaatcatgttttaaattattaattaacattttttcaccaaaattaaaagattgtatgaatgataaatttgaatttgatttaatatctaaattttgataataagattcactaattttaattctatttttgaaattctccaatgcaatttctggatcccaatttaaataatcaggtgaattaactgaatctttaatattttcatttaataaatttatattatcaataattgtttcaataaataaacattttatatttttagaattgaaaaaattaagtaattctaatctttcatttgataacccattaattgcatcataaattgcaatttgaccatttgaatttgaaaaatatttaacaatatcattaatcatattattctttatctttaatttaagtaatttaatatctaaattttctggagagggggtaaagtaagaatttgacattaatttttcgaaatttaaatcattattattatttttccttctataatcacctaaatggaaaagttttgtacgaacacctaaccatcttaaatatctacaaagtgaaattgataaatttgttttacctctaccaggtaaaccaaccattataatacaaatagaacctgcatgaaacatattaccagaatccgttgaatacatttgagctggtgaaatatgatttaaaggtatattattatgaattgcatcagtattatcagtattattagtattatcagtatcaatttgtatactactattatctatattagttgcataaattgaggaaggattccaacgttgaattttcctagcggaatgattaccaggtattttagattcttcgataggagctatatcacttgacattgtctttattccaaccagcaaatcacttactctttcaaagagaagtcaacggttagaatctatactttgactttaaaaaaatggggaaaaagtgtgggagaaaaagagaaatttattcattccgtgcaccatagtagggggtattataagattatatagagtgtttatagagtatttatacagttagtattcatcttctaggacatcatccatagataatggagtgtgtgtagtaggtgtagtaggtgtattagcagtattagcagcattagtattatcactttgttcaatattgagatagtttcttacaaaattaccatatattttagtttgattaacccaatgagaagcaaacatttctctatcattactattctcactgtgttgttctaataactgacatttcttattgttaacatagttagtaataggactaagagcagccactatgaatatatcccaaaataccgccatattgtctctgcttataagaagaagatgataagaagaaaataattatataatattcgtataatttttatctaactatacgaattatgaaaatattgttacgtaatcttatctattttgttatagacttaatatatacatagctaccataagtggcatgtcaattactggcatcccacagaatagctcgacaaagaccaatgggaccgttagaaagagaaaaagaaattgtgttcctgcagagatacattctaagatataaaacccaatttcttaaaaataagtgcccaaaaatagcacaaaaacaacctttaacttcagcaatcttttttccaaagtaatagtcgtgtcgacctcttattcaacagagaagcgttacttatcggagataccaccagggttgccttaatagggtaatagcaagagattcagctattggtttaattttagaagaaattcaatccaagaatcgatattaatctatgctgatatttgatttgtgagatataaatatatcttatatattaatagactaatatatcgatattggaataatattaaaccttcatggtcaagttcataatatttctcatttttttctcatattataagtatatggatatggatatggatatggataaatctgcatgaaaaaagatgtaattatatccttattgttttttatatataatagttatttttccacagaatcagcaaactatccagtgctttaaatacccattgatattaattacttttaacaatagcaatgccttcaagtaaattttggaagaatgctaaatttattataatcccaccaaataagggtgacattaaagttcgttgtaatattgctactccgagaaacattaattctaatggtaaaagtgttgaagaaaaagaacaattctttgagaactctcatactgatgattctagtacaagtgatgttgaaagtttaaataaaagtaaatttatgaaagtaattgattacattccgaataaagttcataatttatggaaaaagcaagaggaagaaattgtcaaaattgaaaaattagaggaatttgaatctgataatgatttcacatctccattagatacattcattggttatgcagttgagattacaggttctgtttatatgttagtttttgttatttcgattttaattgcttggattatttggggtgctgtaactggtgcacctgatacttggcaaattgttatgcaagatggtcaatctattcaaacttatgtttgggatactttccttatgagacaacaattagatgataatgaaaaattattaattttatcaggtaaattacaaagtagattaaaaactcatacaagattattgaaaaaattaaaagataaaaatcctaattttattttaactgatgaaatgagagagaaaattattgatttaaataattcagataatgatttattagtacatatagagaataagaaaacatggtttgataaagtttctgaagtttgttcaaagttattaggtaatttatattgtgttataatttattggattggtatctttgtttggattggatgtggtgcaattccaaataataatggtacagatagtcaaccattaatgcaaaaattctcaaataattggcaaatgtatattaatactgcaactgcaattgaattacttttcacatctgtttttcttgaacatgttagatcaagatcttctgatattattaatagacaaattaaatcatttattaagttagatactgacttagaatgtcttgagagaacaattttgaatgacgttgaagaaaatgaattaattattgttgaaagatgtccaagagataaaattcaaaaaattattagcttttatgctaatgctattggtaatggtctaggtctaataattacattctgtgttttcattatgtggtttggaattggtaatttaatgcattggaatgataattggtggttaattattggtacatatacaggtttagttggatttattgatggtttcgttttaagagaaatttttttttcaattactaattatgaacaaaaaaaatttttagatttattacaagattcacaaggattacttgaatttattggtatttcatatacattagagagatataaaccgaaaattacattagatactaaaatttcattatggattaataaagtttgttcaaataaatggtcagttattgtatccgttactacagttttaggattaattattatgggttgtgcacttttatggtcagaaactgcacaattagttgcaaatactccaacaatgattattgaaggtttctttttattgattcttattcaagcacataattgggcagatgatgaaagaagtaatatggttagagaattaacaaagagtcgtttatttgtacataattatgttaaatattgttttgataataagaaagttgaagatgattgtagtattgtctgttcggattaatgtatataggggtatttttctttagttcattgttttataggtttttctacagtattatttattttgtatatatacagtacaacaaatagaggagattacaatgtgccatgcctgaagtgctcaagattaatatccttttgacaggactttgtcaaaaaaaacgttcataactcagtcaatacttattggaatcaaaaactaagtacatgattggatagaaaaaagagcagctacaaatgtgatatttatgagataatggtatgggggggacataactataataagggtatattttttatctctatctcaccatctaactttaccattaactgaaccattgctctcatacagtatattcatacctctccattgacaattattacctatcctaaccttaactatacttcttataatcatattattaatctctccattaccttccatggctctctgtattatcttccatcccgtactacctaacttagcatattcaatcttaattaatggacttttccaaatacccggttttatattcattttgatattcttttcttttaaatatccaattatattaccttcacaaatagcttctccttcaattatctcaatttcaatatctgcattcttaattggattgtaaaatgtaatctcaacttctttattcattatatgcattgttgtttctctaataaaataattattaccttcctcattacctccactaatatccgatgaactgatattaaatggtatatcaatactctccaccaattcacataaattatcatcacccccaactacactccttttactttcatattcaataccagtaatattaatactattataaattcctgaaataaattctccaacaaatttatcaattattattctcttatccaattctctattattaactgaaactttcatgctaattggtattatattttggaaattctcaaatttaccaatttgaatctcaaataattcttcactatattcatgtttaatacctaaattaattaactcaatattattaactactttcttaatgaaactaggtaaataaattaataatccaacttcaaatttaatataatttaaatctccttcgatatattcaacttcaactaattcaataccctgttttttatcctctaatgcattccccctatcatagatacctatcaaatacttgattaaccatttgacattcatcttaatatcacctttcaacttaatttcaccattgaaaaatttacaattaaccatactattaatatcaaattttatatcatcagtaaattcataatcataatattcttcataaataatatattctaaaacttctttagctttaaaaacattaatgatatcaaaatccacattttgtatcattatcttcaattcattattaataaatctaataatttttaatccattaatccttaatttcaaaccactgaaactaacttctccatttatatctatttcaaattcatttataatactatctttataaacagtattaatttcactactcacaaataatgaattattagacccaataagtaatttctcaatttcaaattcattttctggtattataggaatagaattataatcataataactcttaaatttaaccaattgataaatacttaacattatctctaaatcaacattagaccatgtattacataaccacaatggaatcttatcattattataattattatcattattatcatgacatatatccttacctttgatagctatcttaaatttatcaatttcactatcatcattaaataatctccaaattaaatcattaattatcccattttcaatgatctcctttttaacattaggtaaattaaattgacattggaaaatatctttatttttgttgaatttccaaacttctatattaacaaattcgtaaaacgtttcattaatgttaaatccaagaatcatatcaattcgtggaatcatatccatttcttcaattgaaaagaataaatcaccaaatatcccattgttttcatcatatttatttaaattgaattccaatatttgtaaagtattgagatattcattaatcaatccattagttatcttacttaatttttcatcatttaacattatagatttacgaattggtatattaatcccatgaaaatctatcttaaaatcaacgtataatggatcgacttcaccattaacaattttaggtaattcattagagtttaaatccacatttaaccccattatttcaaattcccaaacattcccagtcaaattaatttcaaactgcctccccttcataccaatattcataacttccttttcattatcattactcactttaatatcatcactaaaactaaacttcatcccattgatccaattaatttcagataaatcaacttgtatttgattcatatcaataattattccattatcattaatatcatcaattttgataaatttaacatttattgcaatactttcaataattaaaattaaataaacataaacaatacttgataaaattattagtataagtaaaatactaataccccaatagattcgtttcctccataatttataatattcaattggttcatcatctgttaaaatactttcattacaaaatattgaattgtaattgttatgtaaattatcattattcgtcaataaactctgtctctcagtatcaatgacattatcatcattatcatcattatcattaacagtatgattattataatcattaacctctctcatgattactcttatagccaacacacacagaatcaaagaaacatacctaatcattacaattaaaattggtcccattcatcgattaaacagggctgttattttttaagaaaaacatttttttttcaaaaatttctattatctaatctaatctaatcgtctataaagtcttatctataacttattcttaataacaatattatcatcacaatgttcctcctcaatcttagcagtaggtgttgatgttaatggtattgaacatttccattctccaacaacaccaattaactctccatcagtaattgaataactattccagtctttattaacatattcaactatttgactgataatttcactcttatacgggaaatcattgaaaatgtcattttggaagagttcattcaacttcttttcagtaatatcttcaacatcatcttggaaaaattcatcaattttttcattaactttgtcactctcataattaacatcatcaaattcatccttactgtaaacaaaattggaaattatacttttcaaaaatttcttagtttcaatctttggtactttttgtgattgtaaatgaacaattaatttaccatttccattagaatcagtaaatttatttgaataatattgaactatatctttcaattggaaactctttaaaaattcaacatctttctcatatctatcaaagtcataataacctgatgcaattctattccattggaaattcttttcttcctttaaattcttcattttttgttccttcttattaattaatgctgaaacatgtttatcgaaatcaactgttgtcattttattcttaataaagttacccattttgatgataaattcatcaattctctttaataaataaaacgttggatattcactttgaattaaaaatcttaacccaaatgttgtacgtgtttctcttgtacctgaaaatacaacatatccaagttgttcaattgttcttaatctattgaaacatggttcatgaataatttgacttacaagttcatttaaaattctttcacgatgatttgatataagcccaatttgtaataaaacttcaatacatgaattcatattttctggatcatcatttggtctaatataatgtgaagttttaccctttggtaaatttaatgatctacctctagtaaattgtgatcttgttaatgtgattgaactatttaatgttggtaaattctctttaacaatattatgaatattaatagaatctgatttttcaaaatttccaattgataaaacttcaataaagcaaactttaaaaagatttaatgaataatttttcaatgaattaaaatcaactgctcccatacatgaaatttcatcatcaactaaccaagaattttcattaaccaatgaagaaataattggaccaacttgttgataaggtgttgaaaatccaaaattttttaaatttctgaaaagtttttccttcaaaatttcataacgtttctccctaatttcattccatgttgaatcattacttgtgaacagattaactgtttcaattaacttctttaataaaatttcttgtttatgggaataaccaataatttctaaactgatcccctctctagcaatatcaaaactataatgtaaaccagccaatgatgcataatatgataatgaacttaattcatcatctaacatttcaacaaataatgataaatataatgaattaagcggagttgaagttgaaccaggtaaattaaatttaattgtaattgaagatcttggaccacttaatgaaatatttgatttataccaaattttagaaaaattatctttttcaattaattttggatatttagttgattttgattttgctaattcaaagttagttgcaataaaatcatttttttcaggtaatgttaaatttggatcagttttcaaatttttcagattttcaatttcattttcaaaactttcaacagtgtattctgtattataccatctttcattttgaattagtgatttatcaatttcaccattatcaaataaatcgttagaaactaggaaagttctaaaattttcaggatttaaataaactaataaatcgttaattaattttggatcaaattttcttgaaattgataaacttaaaatttcatttggtggtatatttgatttattaacagtattatgttctataatatcatcaattggatttttaattggaattgaataaaatgataaactttgtaattgtcctgccattctcgaaactgttgaagcaacagcagttttttgtttaaatttgaaagaattaaaagactctttatgtaactcatcaaaaatccattcctttggaccttctactttgagcatattaagatatttgaaaacatcttcaataactaatttataattttttaaaccatcacttgttaattcaatacttatattaaattcagagaaaccagcagatatttgacttgaaccagctgataatccattagcccaacctttatttttgaaattatatagaagggaacctttggattcatgaccaattaaatgagataaatatctttcaggtagatattcccaaaattgacttgttgaagggaatgggaagcttaattgtaaatttctcatttgtctaattggtttgattttataaattttaccaatataattatttgaattaaatggtgactttaaatataaaggttttggtaaatttttatctttaatttctgaaaataattctaaagtccaatttgttaaaatatccaaggattcatttgataaaattgataaacacataatatttgaagaataattatttgaatgaaatttcaataattcatctctaacatttaaattattttgaattgggatatcacctaatgtaactttattaccagttgaaaatccattatgaggatgatttgaagaagttgtagattttgataattgatataatctccaagtatcagattgtaaattttttttattttcactatcaacagcattaatttctctatctttaccagaaggagagaagagtggattaatgaaaaattgtgagaatctatccaaagcaccataaagtgaatcatttttaatttcgaaataataatttgtatgtaaagatgaggtaaaagcatttgaataacctgaatttttcgataaataagaattataatcattttctaatggatatttttcagtacctaagaataataaatgttcacaaaaatgagctaaaccaggtaaattttttggatcattataagaacctacattaacatctaaagcagcagcagatttatcagttgaaggatcatttataagtaaagcaattaaattattttttaatttaattatacgataatttctatcatcaatatcaggtttattgatagattcattatcagctattatagtgtaatttttttcagtttttgaagtcattgaagaataatattgttttgtaaatttggtggtagcttttattgaatatctaattgagagtaaatttggaaatgattttaaagatgaatataggggtgaaagcatatacagagagattgaacgttgacaatccctttaaaaagtagtaattacaggtacttggagagtataagagctggtaattgatacctttacagaagaagaagtgaatataaaagtagataaagatagctgagcctgcagtagtgcctaagaagggcaaaaagacacgaaaatgaaaattgaaaagagggcaaatcattagaagagacgatgcgtcgaccccatctcagatcttttaatttaatgaacacgtaaataaattactttttctccttttcattttttactattgtcaccatttttttttattttgatgctgtttgttgaatattaattagtctttattcttttgatctttaattcttttatcagactctgcaatcatggctcgttctaatgcaagattagtaagatttgccttttttgcacttctacttatcttatctgcttatatcctttcaaagggttcttcatcatcttatgctgtttcaaataattctcctcattcagttgctgatattaaagaatctttaaatcaaaaacatggaactagtaatgcagctgctaattctaattccaattctaattcaaatactgataattcaaaatcaattgctaatgcaaataaaaaaattattgcaggtgataaagttaaggcaacttttgttacattagctagaaattctgatgtttgggaaattttaggttcaattagacaagttgaagatagatttaatagaaatttcggttatgattgggttttccttaatgatgaagaatttagtgaagaatttaagagagaaacttcaagattagtttcaggtaaaactcattatggtttaattcctcatgatcaatggtcattccctgaatggattgatacaaataaagctgctgaaacaagagaaagaatgagacaagaaaaagttatttatggtgattcaatctcttatagacatatgtgtagatttgaatcaggtttcttctttagacatccattaatggaacaatttgattattattggagagttgaacctggtgttaaaattttctgtgatatcgattatgatatttttaaatttatgcaagataatgattatgaatattcttatacaatttcattacctgaatatcaagcaacaattccaactttatgggaaactactaaacatttcttaaaggaatatcctcaatatttacatccaaataattttatggattggttatcagatgatggtggtgttacttataatggttgtcatttctggtcaaatttcgaaattggtaaattagatttttggagatctgatgcttatttagcttatttcgattatttagataaagcaggtggattcttctatgaaagatggggtgatgctccagttcattcaattgctgttggtttattcatggataaacaaaaaattcatttctttgatgatttaggatattatcatgttcctttcaataattgtccagttaatgaacaaactagattagaaaagaattgtgtctgtaatccaaatgatgatattacctttaaaaattatttctgtaataacaaatattacaaattaaagggtcttaaaaaacctgaaggttgggaaaaatacggtgattaatcgtgatactaatgtacgtatttccaatatttatttacattcccaataccttggtttattttcattaataagttgtttttcttttcctttctgtttttataatagttgataagattaaataaataaataacctttaacaagaatgaaagcgaatcaagtaatttatttttgattttctctccaatttcttcacatcttcttttaaatctatatttatatacccagattaatatacatttggattaatatcacccaattcacactaaaatggccggattattggctcctcgtgtgaaatcaaaaattggtagaactacagttttatcaatactattagtcttcttcatttatttttttttgtggccatctcctggtgaaataattaccaatgatgaaatgaatcagcaacaacaatcaaaatcattttcagaaataccaccaaaatctcaatcaccaagagcgttaccaaatccagttaaaaaagttaaggcaacctttgttacacttgctagaaatgctgatttatgggaattattatcttcaattcaaagtattgaagatagatttaattcaaaatttggttatgattgggttttccttaatgatgaacctttcactgatgaatttattgaagaaacaactaaatcaattagtggtacaaccaaatatggtgttataccttatgatcaatggtctgtaccactttggattaattcagaaaaatttaaagaagcaagagaagatatggcaagtagaggtgttatatatggtgattcaatttcttatagacatatgtgtaggtatgaatcaggttttttttttagacatccattaatggatgaatacgaatattattggagagttgaaccaagtgttaaattttattgtgatattaattatgatatttttaaatttatgaaacaaaatgattatcaatatggttttacaattgcaatgcaagaatatagggagacaattccaacattatgggataaaactgttgaatttatggataaatatcctaattttatagctgaagaaaattcaatgcctttaattagtgatgatgatggtgcttcatataatttatgtcatttttggtcaaattttgaaattggtaaattagatttccttagaagtaaagcttatctttcatattttgaatatttagataaagcaggtggatttttttatgaaagatggggagatgcaccagttcattcaattgctgcctctttattccttgataaggaacaaattcattattttgatgatgttggatattatcatggtccatttactagttgtccaagagatgaaaaggtaaggaaagagggacgttgttcatgtaatccgaaagaagacttcacatttcaaataggttcttgtatgaataaatattataaattcagaggaatcaagaaaccaagttactgattagtttggtattaattagctgaagaaggacattttttaaaaaaacttttaactagactaattaataaaatattccgtgtttatagtgtaatatagtacaagataaagaaacaaaagataaataagagataagtaaatttagtctccagttttaacactcatgctaccctgagaaaatgattttttcggatctggaacttttcaatttctttttattcttaaacttcttttggtacctttttatatacatttctcttattcatacaattatcagcatctctactgaaaaaatggatctggaacttaaattagaatctaatggagaaagacatcgatcaattcccagctcaagaagacccccttcttctaaaagtagtaattattcatcatcaactttaaacacagataacacatttttactcaccaaatatgatgattttatagatgataattacatcatcgaagatgatgctaattcatttgaggaagttgaaacttcaatttacaaggaaatactcctttattactatcaccgtatacgaaaacgcatttccattttggttacgttaccttatatagttaatatatgtgggctgttgttagtgatattactcagtttaacactcttttattcatcaaataattcatctcatttgaatataattaaggaaaaggatagatataccccattgcataaaatagtgataccgtatttagataaattatatccaaattatcattctcagtttacaaatatttcacaaaatatttttgatccaagattttcacctgcactgttattaatgtatttaaataatcatataatacataatgaatataagctagaggctaaattttcaattggttttagttgggatgattggattgatattgattcaaaattaagttatgatgatgaatatcttttggattggttatcacatcattcagatgattttactgatgatatttcaaaattaagagatttagattgtaaaacttttgcattgatttatggctgcgagttaaacgtaaatttccattcaaaatgtgttgacttaaatcaagatgaaaagaaaaattacccatataaatttaaaataactggtccaacatctgccaaaataaaagaacccggcagattactatatgccggatcgtatttgaaacttagtatgccaccacctgaacgtatttttatgcttgatgtttttggtgaaaatggtgagggaagtttgatgattaatgtagatagctcaaaaaatgaaaatagaaatgaaatttttagaaataaagatgttattggtaagtttatagatttagagatgaaaaactcaaataggaatgaaaatgaatttttagaaaatggaatttatattaaatcattaagaaataaactatcaaatactttagcatattctgatgttgaaaaaataatttataaagaagagaatataaatatagatcgtgatcaaacttatctttcacttaattctagaaataaagatcctggtatgaccctatccaattgggagttttcagactttatgtgggatgagattgaatttttagatgagttagatatgaaagcagacgttcttgatactaagaattatgattccataatgaatgacagattaagtaaattagaacaatttagaatagataatgattatcatccaaaatatttttcagaagctgatctgtacgccgtttcttatggttcacattatgattggagatttttttcaggtagttttatcttaaatgattatagaaagtcaattattcatagactttcaagaacttggcttagattttgtcttgagaatgaaatcaaaactttcattgcatatggttcaatgttaggttggattagaaatggtttaacattaccttgggatggtgatattgatgttatcgttactatgaaatcacttaatttattagcaagaaatttcaatcaaacgttaataattgattataatgaaaaggatgggtttcaatctgcaatgactgggtatttattagatataaaccctgcatattatagtagatataaaggtgatggtaataatgttattgatggtagactgattgatataagtacaggtgtttatctagatattacagcactagcatggacagatgattatcttaaaagtattcaaattggcacaaataaaaaacttaaaaaattgattgataaagattatgaaatgaatcagtattttgcagtagaaggtgatgatgtctattacgatacattaatgtttgaattaaggaaactacaagatgataaacagttgattcattgtaaaaatgataatgtttataaaattagtgaattaagtacaatgattccatcatattttgaaggtgttagggcacatttcccacatgcatatgaagaaattatttggagattatatccaaaagctttaacgcgtataactgaacctgatcatgtatttgatgactattttaccctttggatcaatacttttgattgtccaggttatgttgatcctgttggcaatctttatgcgaatgcacaaatgggtcaatgctccaatactgaagttttacatgaatggaaattaacaaaagaatatacaagtcgtcatcttcaaatgattgaagaaaaaaattgggatcattatacattgtacgaaaatagtgaaagcaaacctttcagaatagatgaatttttcttattatatgcatcaacaatggaaatttcagaggaacaactatttaacttttatacccaatagtctgtatatagcttatttaatttaatttatgaaagtttatgaaatcagctttctatacaattttttacaaaataagaatcaatttaatcagttttcttaactgcaagtttacctggaatatatgggaatttttcttggaaatgttttgcaatatctcttctgttacaaacccaaacaccttccttctcactaatatacttcatgaagtttcttaatgcattggttctacccggcttaccaataattctggtatgaagcggaatgttcatcattctaccaccttctctgtataattgatcaaattcgttctttaagtaatcttcataaacgaaagcacctgggaaacctggacctgggtttgaagcaacaaatttataatcattgttaacatagttgtatgggatcattaataaacctttcttttctttatttggtaaatctttttcatgttcacaatctctccagaatggaatatcatcattataaacatcagattcccaaagtaatggtttacctaattgttcatgtgcaattttaaccaattctggggttctgatattagctctaccgatataagcaccaactggagcttcaccagaagcttcttctaacattaaaatggcctgcttaatcatttcaatttgttcttcatcgcttaaatgggcccattgtaaccatcttaacccatggttaccaatttcatgaccgtctctaacacaagcttttgcaaatgctgggttcttttggaatgcagtaccaacagcatacaaagtcattggccagccaaattctttgaataatctgattaatctccatgcaccagctcttgaaccatattcaaattctgattcactcattaaatgtctaccatttaaaacttcagtagttgctccacctttttcccaaatgtaagcttcagatctatcatcaccatttaaaatattgtgttcaccaccttcttcatagttaagaatgaaagaaacggcaattcttgctccatttggccattcaacattgattggtttctcaccataaccaattaaatctctaccaggagtgtattgtggcattggaccaggagtgtaattaatagtatccattttgtgtttgtgtttgtattttttctgttttttgttaattcaaaaaaaaaaaacatatgaataagttagttcacaacatcaacgaaagtttaaccgccttttataactacagacctgatgataagttccattatttcagtacctgatctgataactgaaatagatcggaaagactccgttaaataattgcttatcgcaacgcccgaaatttttcttatcgctataatctccgtcggttttatatattttcatttttcggattctctccgatcactgacattagttgaaggtctgataaagataaccatgatagtcttgattaataattgattgggataatcaaaagtctcttatcaaaatacccagctacaatcggaaatttaccgtttcccgattttatgtttagctcgccagcagtttgaataattagttctcaaagtaacttaaaactattagtatctgtctaaaatttatttccgtttttatttcaaaagttaattttcttaagcaaaaacaaaatacactacaattaatgtctgtttttacatttgacacaaaggaaggtaaccctgttaccaaagatgatatcaaaacacttggtgaaaaactaggtgttcatgaaaccaaggaagttgacatcaacgattacaccactttgttaggggttttccatgatgcatgtcaagaaataatggatatggatgattatttacaagaagttgacttagaaagatttccaagaaaagatgttagatatccaaccaaggaagaaaacaaattaggtggttggggttggaaattctccatcaaggatgaaaaacctacttctactggtgatagacttttagaaggttccaaagtttgtgtcaaggattgtgttgctattgcaggtgttccaatgttattaggtaccagttttatcactgattacactccaactactgatgcaacaatcattactagaatgcttgaacacggtgcaactattgaaggtaaagctgtttgtgaaaacttgtgtcattctgcaacttcccactcatcaggtactggttacgtccacaatccaagggctatcggttattccactggtggttcctcatcaggtactggttgtattgttgcagatccagctgaagatattgatattggtattggtgcagatcaaggtggttctgtcagaattccatctgcttggtccggtctttatggtatgaaaccaacatttggtttaatgccattcactggttgtgcaactaatgaagcgactaatgattgtttaggtattatgactgaatctgttttaatcaatgcaaagggtcttcaagcaacagcaggtactgacaacatggatgacagaggttttaatgttagaaacggtaagtactacgaccacttaatatcattagaaaatccaaaagatttaactggtttaaaggttggtattgtcattgaaggtttcaacaatcccgcagttgaagaaagagttaagcaatgttgtatggatgcagtcaagaagttcgaagcattaggtgcaactattgaagaagtcagtatcccattacattccaagggtccattaatttggacaggtatttccaaagttggtggtttcttgaccaagatgggctgtggtattggtagacgtggtaccagtttaaatgatcttaacgacaagtttgccaaatcattaaaggatgctgaacgttggaaggaagcttacccatcatcaaagaatatctactataacggcttatatgcaactgaaaaattcccaaccttatatggtaaatgtatgaacttatcaagaaaattaaaggatgactataatactgcattggagaaatttgatattgttgttatgccaactgttccatttgttgcaagatcccactgtgatttggacaatgttaaacgtccattagatttgttaggtaaacaagttggtttaagttccaatactgcaccattcaatcaaactggtcacccggcaatggcaatgccatgtggtttattaccaattgaagaaggtccattatcaggcagtggaactaaattaccagtttccttacaattggttggtaagtggtacgatgaaaacaccatctatagatttgcctatgcatttgaacaatcgtatgattggacttccttataatctttgtaatttgacttttatactaataattaataaatggactgaattattaattaccttgtaaaaaaagtgtgcataaaattggccaattaaaaaactgcttgaactaacatgaaaattttcactacacagcggggctcaacgatgtatcgacgtagtgaaccgaattcataaaattccagtagatccttcaaatacaataagttcattactttctataaaattatatacagctcaaccatctagtggtttcaatcctttatccctgatcaaaagatttgttacaaaacaatatgccatacatcccatccagatataaaagatcttcttcaatgaatccatatagattgacttgagatactcggattgttcaaaactatactgtgataaatcaactcttgaataaagttgtgtctttaaataatctagttgttcttcgttaaaatattgactgcctgtaagtttcaaattcttcaaaaatgtattggcaataacagtggatgagattgctaatccaacagaaccaccaaacgatctcaaaacatttctagtggaaataatagtggccctatccctcttaaatgaatgtgcttgtgctgcaacaagagttggttggaaaatacatccaactcctaaaccgttcaatactaatgtgccaacattgacaccttttctaacatcgactgtccaaagattcaaaagacccatggcaaccatccaggaactatacccaaacaacacaacatgccaataatgctttgttctggaaatgaattgaccaccaataactgaaatagtggattgtgggaaaaccaatgccaatagataacatgaactcaaagtaactgaataatctctgataacttcaaaatagtatgggtaataataaacggcactataataacagataccaaagaacaagttttgtgagagtaacaatgataatgatatgttagtataaaataatttaattgggatcaaaggtaatcttgcaaacttcatttcatagatgatgaagcatacaacggaaatagaacctatagtgagcattgcaatgaccagtgcactgttccattcaaatgatgaaccacctccactgacagggatcaaaatgaatataataccaatggaacttagaaggaatccaccgtaatcaacattcttaatcttttccataatattgcctacaggcttagtgtatggaaccataaaatgaataatcaaagttgcaggtaggataattgcaaacaatgtgaaatacatctttctccatgtttgatgttgaatgaaaccagatgcaatgaaaggtccgatggcattacctaaaccaacacaagctcctaaaataccttgaaatttccctctttgttccaacgtcacaatatctgaaacaatcaccatagttaatgaagtgacaccaccgttaccaataccacaaaaaccacggaaaatgtaaagttgagttggagtttgtgccaatccacaagctaaatctgaaaatgccaatataatcatgcatgcaatcatagtatattttcttgaaaaaatatcactgaatctaccaaataagaccatgaaaacggtgttactaatcattgaagatgtacccgcccatgaaattgtcttttctgcacctaaatcctttgcaatatgtggtaatgccacagtaatacttgtttgatcaacgaaggataggaacaaagcagttgccatggctgcaaagacaattatgatctgctttgatgacagaatattatcatgagcatctgcaactttttgtgcaagttcttcttgtttagttacttcagtgaatttctcttcttttatgctgtcttcacttgatgatttctccattatgtgtgttgaatagtaaaatttaaattgtggttagggaactataaaggaagaaactggtacattaatatgggcacctatatttacgacataaaattgatagtgttactattgaacccttaccgcaattcaatcggagtagattgaaataggaatgtaagatagaaagttgtagataaaaaataaattgatcggagactctccgtgataaatttcaaatgcgagaagcgaagtctcggtatggccgttatcagtaaatcttttcttattcttatcgcctagtgatttttttatcttgacatgataatattcatagaaaagagtatttataatcggggctccaccgactgaaaaattattgtttgtccttttattattgtgttcttctaattaattactcatttaggtatttactttgattaaattatccgataatcagataagacacaagataagatttaaccctacattgcaatagttaattaatttattgttagataaacggatcaataatctattttcaatctgatatcatattttcttatcatcccatttgcacgttcttttatttcatataaaaaactttgacattttcctttttcacttcttggtgctacacaattactcttactattatatttattaaattatattttttatccttgtacatttattttcaaataaagaagcaaacaaattcaaatggaaaacccttttaaaacactcaagttagattcagcacaagccgaaggccattcatggtacaacaaagatttattaccaactcctcgtgaggaaagaacatggtctagaaataatttcttgttcttctattttaccacttccttaactccttcatcatacactttgggtgcaacattggtatctatgggtttactttggtggcaaggtttaatctgtgccgttgttggttcagtttttttatcaatcattttagttttaaactcaagagcatcttctgaataccatctaggtttccctgcaattgttcgtgcacctgctggaatgtatggttcatattttttcattttcattagagtctccgttgcttcaatttattttgctactcaaactttctttgctggtagattgatgagtgtccttttaagatcaatctttggtcacaaatggaccgacatcaaaaacacatttccagaatcagctgaaactacatcatctcaattattagcattttttattgtctggattatccaattaccactgatttttatgcatccaactattcaaagacatttatataccgtcaaggctgttaccactactgttacattatttggtgtttttggttactgtgttagaaaggctggtggtttaggttctcccgaagatttagcagcaactagagctcatgggtcagcattaggttgggctatgatgtatggtattaactccattatgggtgcattatgtcctattttaattaacgctggtgatgttgtcagatacgctaagaagacatcagatgctgcttggttccaatcttttgcagttttatcttcaaaggttttaatcactttcttaggttgtgctactacctctgctgctaaggtattcttaggtaagacattctggaacccatgggatctttatgaggcattattagattatcattggactgcaggtatgagaactgcaatggcatttgcatcttttggtatgattttagctttagttattgttaacattggtaccaactgtttacctgtcggtgctgatactacaggtatgtttcctaaatatatgacaattgttagaggtcaattattatgttggattgtttgtccgttattcttcccatggaagatgatttccagtggtgctaagttcttagcgttccttggtagttattccattatgctttgcccagttgctgctgtgatgatttacgattactactttgttagaaagggtaacttccacgttgtttctttctacagcaatgataaaaattcaatgttatggtatggtaacaaatttggtatcaattatagagcttttgttgcgtggatctgtgcagttggttcaaccatctctggtgttgcaaatgctattaataaaggtattcttccaattggtgtcacccatgtttattatttagggttcttattatcattcacaattgcatttgttatgtttggattattaaactacattcatccagtcgaacaaaaattaccaaacaatatggatatcaaagacgttaaatttgaagaattctcagctactgatggtttccttgatgaagaaactattgaaattgttaccggtgccagtgaacataaaaacattacagatgattcaagtgtcatcgaagtaattgatattcaaaactcttcaaaagcttagtactggtaactaatactattttaattattgcttcactcttatatttataattttcatttttttttatttaaaacttcgttaatctttacttatcaatatcttgaaaccaaacataatccggtaaaagacttttgctttttgtttacaaatctcttgctaagttaagaaacatctgttcttaacctgcaagttggtgacaaataatttattatactgatgtgatatcgtaaaaaaaggaatctgctttgacatcacttacagggatttttttgggagtatgtcaaaaataaaaatttcagttaaagtgacaagaggccaccaaattaacaacaataaaatgataattataaggaacagtcccgtagctatagcttcttggattagattagataagataagactttccatgtcaataactcaaattttcgcacaatctccgttgtcttatcagagagcacacccccaaatcccgataagaaatttatcgtccgcaaaagttgtataaaaagtatcggaatcgctccgtttcctataaccaacggagatcaatcattttggaagggtgtttaccttagtagactatagtacagagagaatcaatagacaagaatgaaactggtagactcaacagctaaggtatccaaaggtacaagaatagacttaaacaaagttgcatgtatcagatgtcaatccaggaaacaaaaatgtacaggagatatacttacaggtaagaaatgtaaaaactgtgagaaagcaaatgttaattgtgaatatagtcaaaaccgaaaccctaattatattaagatattagagagtaagatcaatcatcttgagagtatactagcaagcaaggaaaacgaattaatatttaaaacagaaagtccaacacaaatccaaagacacgatgagtctattaaacatattgacagttatagtgacagaagttcagttagtgatcatatatcaatgaatgatggatcagttctgaccaaatgtgctgctttgttcccgttaaaggatgatatggaaccattatacgttggatcatccggattaaatattgcatctttattacaagcacatttaaaacttgaattgagtgaaacgctaagagaacaacagaagcaaacaacatcaattgagcataataagttaatcaatgataaagtagtcatttcctttgatacattattggaggataagaaaaaacttgatttgtatgtcgataattacttgttcaagatgcatatcaagtacccatttttaaaaatggactatattactgaagcacatgaaaacagattagtatatttaaaaaatgttaataaacaacaaaccaaatcagaaacaatcaaatcatttacattattaatggtatatgctatcggttcaatgcttacaggtaaacaacaaccacatcatcacggaacatctgaaccatcaatgaaaaacgataatttcctatttttcacaactgcaatgaaacttaacttatctgtgatatttgaaggtaaaagtataaacaatattcattgtatgttattagttgttatttatcaattaagattacccaatgggcctgttatttgggatattattgaatcggcattaagattatgtgttagttttggatttcatagaaagaatttacaattattacatgaaaagccggttgaatatcagtatagaacattaactttttggtcaacatattcattagaaaggtctattagtggtagttttgggcgtccatatttactttctgatagggatattgatgtagatatgccaattaatattgatgaaagtgtatttgataataatacaattatagaggaatattatactaatattaagaaagggtttgttattaacagactaacatcacgtagtcaagctatttataatttcaagtttaagaggattgaaagtgagatacagaatgaaatatatagagttgatttgcctattgatcatattccaagagagaagattaatatgtttatagagaagatgaaagaatggacaaatacgattccccaattattatcaagtaatgattttgattactatttgtatttgtttaacaagcaaattagatatttgatccaaccatatttaagtcaactgagtaatgatgaccctttatttattgaatgtatgaaaagttcattgactgtttgtcagttgagtaaaagaatggatcataacacaaaatcaaggttttcatttattgcattacaaactatttttcttagtggagcaacacttatctatggattgttatcagagaaacttaaatggaatttttccattagtgaaggtttaagatgttgtagttcaatattgtttagtgttgctgagaggactggtgcatgtgaaattttctctagattatttgagaaattagttaacatggttgaagagaatcaacaatctaagatgaataataagactgtcaatgaagatgatattttcattaataataattttgatcttttcggacaaaacaatttaaaaaaacatgttcaagatttacataagaaggaaaatttacagtttttcaatgaaatattgaaaacggatggttcagatgttgatttagaatcacttttctgtttccctaatttagacttgttaggaaccaatagaattgatgatattatcaagaaaacatcaagagatactaagttcattgatgatgaattatattttggatttgtatagttaatgaattatatatacaattttatttagcttttaattcttttataccacgtacgatcgccattatcattatagttgcaaatggccctaaaaggggtgaataaactgccattttatgttcttcagggaaataagcttgttgaaccatatctttatgaaagaaagcattatttgataattcaactgcattaattgaagttttataagctaaataccattgagaattatttaaataatttaaagtattttcaatttcaattattgattgattaatttcttcaactgattttaatggaattggtatagttttcaattgattaattaatttatttaaattttggaaattaattaaactttcatttatatttttaattgtttgaattctaataaattcatcaattttgaaaaataatgattttccatcattattgaaattatcagtttctgaattaataccaattaattttaaaagttggaatgcaaatatgtcgaaaatttcattcattttattataatcaattgaattaacttcctcatcattaagtataataacactaccccatttactaataatgaaagaatttttttgagaattttcaattaataaattttcaccatcaggtaaataaaggttaagatttataattggattaatatcaaaatcttgatctaacccccaatttgaataatcaacaaatctatttatatctttaataacagtaaaattattttcattaatatattcattttcagttataattctcttttcatgccataattcttgaaattcaattgtaaaatttgcaattgtattaagtgaatttataaaattttggaaattattaattgatttttgtaaaatttccttatttgggaaaattttattattttcatgtaagaaattaatactaattttataatttttattaaatggtaatttaataagttttgaaatattatcaatttgatgataatttaattctaaattaaatatagaatcaataagtacccttgaaattaaatcattaatcataatattatcattagtaacatataattcaattaatttatcactatttggactaacaattaatttattttcaatatcattaggtattattttcaattgataagtatttgtatcgttattacttttatttattattgaaattttagcattagaatttaataatttttcatcaagtttaatttgtaattcattaatatctatatcataaccagatatttgtacgggtattttataatttataccatttgaacatttttcatttaatgaattcatttcatcaattggtaatgatgctctttcaactgatgttgttaaataccatgaagggaatccaattattatagctgttaataataatacaattataattgaaaatcttaattttttatcatcattaatgataggagttgattcttctttctttatgttggtatccactacagtcattgctagtggaatattgaaaaaagaagtaaatgacagttgtttattaaatttaaattgaaggatcttgattacatgataatttcatgttaccgcgtaatgtctttgaccagtagtataggtttattctagtttattttattctattttattttattttattttataatatatttacatgtagtatatagtagtataggatagtataggatagtataggatagtataggatagtataggatagtatattagaaattaatgacaataccaggaccatgagttgaacttaaaacagtttgaccaataacaattggtttctttgatttagttaaacttattgattccttaattgcatttgaagttgctaaaatattatttaaaacttcactatcagagaaattacatttaccaacagttaaagaaatataattatttctctctctaaaaggttgagtacctaaagttgaaattattacattatttaaatcttcatttattgtacctcttttcacacttggcattaaaccttttggacctaaaattttactaactttccttaaattttgttcaatatcaggagttgctaaaattttatcaaattgtgaaacatttaatgaaccatcaataattttatcaataattgaatcatttgaagctaaacttgcaccattttctaaacattgtttaatctttaattcatcatttgtaatacataaaattttagtttccttaagtggttttggtaatctaactgaaccttgtaaagttgcaacacctctctcttttaaaattggagtttgaattgtaattgaagattcattatttgatctaccaacttctgcagctcttaaaaatctaagtgcttgacttacagtcatgaaaagaggatttgtttcagctggctttttagcagctaattttttagcagcttcccttctagcttgtcttttctctaaagctttctttgcttcaacatcttttttattctttggagcaaggagaggagagaaagatgagaaatatctacagttcctaacagagagacctagacgtatactgttatgagagagcattgtatagttattgcaattcaaaagaagttattctcccataacattaactattaatcattgaataatacaaatagtgaaaaatttaatttcccatagtgttaataataatagtaagagaaagtgcacggattattgaaatttgcaaatttattattatgttgacttatttggacatttttcaataagagttagtattactactttcatttaacatagtacacatagacatacaatgaacggtctctctatgccacaagataaaccacaaggtcaaccatcattcttctctacacctttaggtaagattggtcttaatgtcgttttattcgctgcaggtgtagttttacttcaatcacctgttatggacatgttagttcctcaatttgattaattatgtatgtgtcttggttaattgataagtatatctgtatataattatataattattatctttataagatattaaaattaaaatatattgaattaaataagtagtgattataaagaatgtttaaaaaaagaatgtaattatattataaaagtaaggtaccctattattattatggtttttcaagttctgattcatcagtatattcatccttaaatcttgttttaccaattatatgtaaagcatgtaaaacacctgggaaccaaatacaacaacaaaagaatgcattaactaaaactgaaattttagctccttcacagaggtaaactgcaagtggtggacaaaaacatgtaataccaattaaagcccatttattaattgccattatgtgtatgtatactttatctatttaaagatgtttaaaagaaacaacatgtagtaaataataaacatcatcaaagtcatcgtagtaataattaataataacttaatattaatatgtcaaaaagtttttaaagataagtaatcatatcatcacactacgataagagaatatcttactttattgtccaatcagattacgttattcatgataagtttatttctttcactgttttggtgttatgatggtatattatggtaagtatgtctataacacacatagatacctctactgggtgttatatcatataagaaatgccccttattaaaggaaagaaggtaatataattatattacataagcacacacgtgacattgcccatttgcacgtgacagtgcgaaatgcttacataaagattattcttatcagttggtaatagatggactttgatttgacatatttttcactgatttaactcaataaagatattattttattttattttattttattttctttaacttcttttcatctttatacctccttcttctttctttaaaagctaattaacgatgaagatactaacacaactaaatacttcaaatgaatcaatcttattagttgatgaaacttcttcaaatcattcaatttctaaaaatttaattaataaacttaacctaactttaaattcaaatccttttaaagttatcttaattaatccaaatctcaatattagtgatattgaaaaatctttatcattagaagatcaatctttcatagataaattatcaattattaataaatcttttgaattaaatgatttatttaatttaggtagagatgaagttttaaatattattgatagattatttatattaaataataataatgaaactactataccaattgaaaccatttataatacatgtattaaaaatagaattccaataaatacctttaattcatcaaaatattcatcatttaccttattatcaacttataataatgataatttacaaattggtataacaactaatttacaaggttgtaaattatcttcaagattaaaacgtgaaattattaaatcaattccaccaaatattaatcaaataattgaaaatgttagtaatttaaggaaaaatattaatttaaatgataatttaaataaaaaggaaaaattaaaatggttatcacaaattattgattattatcctttaaaggaattaggtgaattgaaaattgatcaattaaatgatcaaataaattatactgatattgatgataatgcaagtactgtttcatcatcatcatcatcatctctagcttcctccacaaacaaacgtggtagtatatcattaattggttcaggtccaggttcaatatctaatttaacaataggtgcattaaatgcaattcatgaagctgatcttatacttgcagataaacttgtcccacaagaaatccttgatttaattcctaaaaatgttaaagttttcattgcacgtaaatttcctggtaatacagataatgcacaagaagaattattgaaaattggtttagatgcaattaatgaaggtttaaaagttgttagattaaaacaaggtgatccgtatattttcggtagaggtggtgaagaatatttattctttaaacaacataatattaaatgtaatgttctttgtggtttatcaagtgcttttgttgcaactgctaatgcaggtatacctacaactcatagaggtgttgctgatcaagttatgatttgtacaggtgttggtagaaagggtaaaatacctgataatttaccaatttatgaaccaaaaagaacaactatctttttaatgagtataaagagaattgttgatattttaccaattttaattgatgaaaaacaatggccaaaagaattacctgttgcaattgttgaaagagcaagttgtggtgatgaaagagttattagaacaagattaaatgatttagttgatgtttgtaataaaattgagagtagacctccaggtttaattgtaactggttgggcttgtgatgtttatactaaattaaatgatgatgaacaatttagaataatagaaactggtcaattggatgatgctaatactaatgtagaattagagaaaattgttacattagttaaataattaacgtttatagaatattaaaacactgtattatattaattacgatttggaaataaaatatttccttaaagggaagattggatgatttcaagaatttttctcacgtcactttttattttatggtttgaaaaatttaaaaatttttacaattaaatttcagtctgtacaatcatcatcttcttttaacaaatatgagtaaaagaaagttaggactaggtaaatctaaagtgaagaaacaaaaggttgaagaaactgttgaaaaaaatgaaaatgaaagtgggaaagatgaacaattactaacagttgaattaactgatgaagttaatcctgatgatccattatcacaattatttggattatggaaaacttggaaagaaagtgatagaagtaatgaattaatacttaatggtataattaatgaatgtgatagaatcttaagaaattgtattgaaaatggtggtaatgaaaaaatttcaattaatgataatttttataatatttatggtcaagcattaagtgatataagtaaatttaaacccgaaaatgaagtatctgattggatatctaatgcattagaaagaattgatgaaggtatggataaatttggtaataataatattagattattatttgcaaaatgtaatattataattaataaaattgcagttgaatttattggtcaaatgaatgttgattcaaagaaagatgaattccctcatttgaaaaaacaatttaaagaatttacaagtagttggaataaagcttttaaagaatgtgaaaaaaataatgattattcaattttaaaggaagattgggtacttgaaattttagatattttcgatgatttattagatataattgataaatttggtacacaaatgaatgaagttgttgatagtgatgatgaagatgatgatgaagaagatgatgaaagtaatgaaaaggcacctgttaaagaattaattgatgcaactgattttgaaatttctgaagatcatccattatatgaaattcaaaatgatgatagttataactttttctggagagataatatgattaaatataaagaattaattggagatgatgcagatattaaattaattagaaatgttaatgaaaaattaggtcaaagttatttaatggaagctgaaggtccaatagcatttttcactagttatcaatacgaaagagatgaagatgatgataatgaagaagatgatgatgaggaaatgaaagcatcagtagaagaagcacgtaaagaagctattaaacttgttgaagaggcattaaaacatttacgtaaaactcataatgaagaagaaccaaagacttgggttaatatagctgaagctttaatcacatatgctaacttacttgaattagatagtgaagagcaagaaaatacttatttagaagcagaaaaattattgagaagagctaataatgcaactcatggacattatgaagatattctcaacagtttaattaaataaagtatataaattttaagaaaaaatagtttacaataaaatataaaaggtttaacatatactacatattatcaatattgaattgattccttcaatattagttttgtttctaagaatttatttgaaaaaaactacctgaatttgataaaagtttctggtgttgatacttggtggagttattacaattcgttttttacgtacaacaacaaaccaaatagttagcaaaagttcctttcaagggttcctactgaaaatgcaattatcccaatctccgaaattattcttattgcactaatctccgaggctagtattgcgtaaatttgaacttgacaatttcagtgtaaatataaatttagtttattttagtttataattcaactaataagttaattaacacattctaagccattattagaaccttcaagaacatctgtagaaggttggcaaaaagaacgcaatataatatatcaacagctggaggcttggtcatgaacttccctattgttctccaggaaaaaattttttttcaacgcaattttcactcaaattgttcactcattttgaagattataaataaaggcattgttctcgtcttttaagcttaatttgtctttagtctatatcttttatcttttaccaaacaaaatcaatcaaataaatatgtcttgctgctcaaatactaatactaatactaatactagttctaatactgctgtttccacaaaatgtcctaagtgtacattaaacaaatgtgaatgcgaatgtaaatgcgaagataactgtcaatgtgaagaatgttgtgaatcaaccactgattcaggatgttgtgctccaaaatctactaaatgtgctaaatgtcagtcaaacgattgtaaatgtgattgtaagtgtgaggataattgtcaatgtgaaaaatgttgtgaatcaactactggttcaggatgttgttgattaatgcatttatttatatttttttttcaaactatttaactataaataagcttaattcttaactgataaagtaaattgcacatgtaactacctcttgtaaaaaagtacgtaatcatagataaacaccaatatgtcatgaatgggttcgaggctcaacacaatagtgtgtgatccgtacaccataacttactacagtacaccacatagtggcaagaattgtaataagagaaagatcgagagacaacaagacatttccaaggacgaatagaatgtcgtatattatcatatatagccttttgtagaacatcttcaatataacctattaacaggacctataggactgttaatattcccttttagtattaaacttacgtaatctttatctaccccgctaacttggatcttacacaatatgtttaccctaaaaggaaatttaagcgataagaaaattttaaatctgcaaaaaacttttgatcaaatgaaaaagttcaaattaataatcaagctgatctgtttcatcttccattcagtagacgaagacattataacttccatgataggtggtgactatttgaatggttttattccaagtgaactgcttgaacctttatttataattacattaaattaaaataaatacaaagagttaattactgtctataaaaatatatacagctcaaccatctagtggtttcaatcctttatccttaatgaaaaggtttgttacaaaacaaaaggctatacatcccatccagatataaaagatcttctttaatgaatccatgtagattgacttgagatactcggattgttccaagctatactgtgataaatcaactcttgaataaagttgcgtcttcaaataatccagttgttctttgttgaaatgttgactacctgtgagtcttagatttttcaagaatgtattagcaataacagtggatgagattgctaaaccgacagcaccaccaaacgatctcaaaacatttctagtggaaataattatggccctatccctcttgaatgaatgtgcttgtgctgcaacaagagttggttggaaaatacatccaacacctaaaccgttcaatactaatgtgccaacattgacaccttttctaacatcaactgtccagagatttaaaagacccatggcaactatccaggaactgtatccaaacaacacaacatgccaataatgttttgttctagaaatgacttgaccaccagtaattgaaataatggattgtgggagaactaatgctaataaataacatgaactcaaagtaactgaataatctctgataacttcaaaatagtatgggtaataataaacggcactgtaataacagataccaaagaacagattttgtgagagtatcaatgataatgatatgttagtataaaataatttaattgggatcagaggtaatcttgcaaacttaatctcaaagatgataaagcatacaacggaaatagaacctatagtgagcattgcaacgaccaatgcactgttccattcaaatgatgaaccacctccactgacagggatcaaaatgaatataataccaatagaacttagaaggaatccaccgtaatcaacattcttgatcttttcctccatattaccaacaggcttagtgtatggaacaataaaataaataattaaagttgcaagtgggataattgcaaacaatgtaaaatacatctttctccatgtttgatgttgaatgaaaccagatgcaataaaaggtcctatggcattacctaaaccaacacatgtccctaaaataccttgaaatttccctctttgttccaacgtcacaatatctgaaacaatcaccgtagtcaatgaagtgataccaccgttaccaataccacaaaaaccacggaaaacgtaaagttgagttggagtttgtgccaaaccacaagctagatctgaaaatgccaatataatcatacatgcaatcattgtatattttcttgaaaaaatatcactgaatctaccaaataagaccatgaaaacggtgttactaatcaatgaagatgtacctgcccatgaaattgtcttttctgcacctaaatcctttgcaatatgtggtaatgccacagtaatacttgtttgatcaacgaaggataggaacaaagcagttgccatggctgcaaagacaattatgatttgctttggtgacaaaatattatcatgagcatctgcaactttttgtgcaagttcttcttgtttagttacttcagtgaacttctccttatgtgtaccgtcttcagaggaagatttctgcatcgtgtctttgatagtgaaaattcaattgtaatttaataaggatgaataatgagttatactattggtattgacatacatatagctttatatagtatatcaactacagaagataaagtatatttcagtcagaagacggaaaatcatccttccgacaaattttccattaccaaaatcaagatatgcgccacaataaatttcttccccccccaatttcttatcggtaacttatcttaattgaccgattgcttttatcattaatggatagaaccgtaaaagaatgtagtagtgttaataatgagggtaaaattattgaaaatctgttagatgatgattttaaagcaaattctttcggtaaatagacaaaaaaaattcaaggatataaccatggatataaccattgatttatattctgaaattcaagtataaaacttaatgaagttaacactaccattactattattgtcaaaacattatcaattgacggaattgaggttgaaaataataaatctggtataattgaaggtgaaattagagaaggtaaatatgaattaccggcaattgttaaaaactattaatttggaaatgaaattaataattttatcaatttttttatctcatccaaaaaatagaaaaacaaatgaaaaaaaaatacaactagtttgtatcgatagtattggagaatggtcaatgaggaacaagcatagtgtaatgaagatttaatatacctactcttggtgagaaaaaaaatctggtaggtttatgggttgattcaatcatcactggtgttgcaaatgcttttaataaaggtactcttccaattggggtcagtcatgtttattattaaaggttcttattattatttacaactgcgtttgttgtgtttagatcattaaactacatttatccagttgacgaaagattaccaaacggtatggatatcaaggacgttaaatttgaagaattctcagttactgataaattccttgatgaggaaactattgaaattgttacaggtattagtgcatataacagatgcttcagtgttactgaagtgactaatattcaaaattaaagtttagtatcaaagactgatacatacttaaaatatggcttcatttctaaacgtatatcaactccataatatttttaatttgactttcttggacaaaacgatttaaagttcaagatttacacaagaaggggaatttactgttttccaattttggatttgtatagttgcttatataaattaaagaactctaacaaaactttgaaaaaagaaagaaaaagaaaagataagacccaataaaattaccttatatggcaaaagataaacaataacaaacgcgcttatgcattgtcagaaatagatgatctctcacaaagtttatcatgtttctattgtaactttacatgagagcaacagtgggagtcttaaactattaccaaattaacttctttaatagggccattagttccttctattggtttcatattttcaaactcttgtttcaaatttattactgctcttttattccgatatcttactcttttcaaattccctatcccagaatttgtttaaatatactgctattacttttattttgttttgttaatatgtgatatatcatattgtagtctatattttctgtcttgtatcttaatattaatattaagattaatattaacaatcttctttataacaagaaatagtacctgttgacatagtgttaactaaaattacctcatttcgcaaatttatacagtattattattaggtgacaaattattaatatttccttcacactggttcttttccaccctccacatctcatcccgtactacatttaataataactgatcagtcacattatcttgtcgtatcataaatcactcacacagtatattattaaaatagccaattaccatactaaataataaaaatataaccctttttattacgcaatcaatctccaaatttttaattttaacaccatttttgacaaggcttttttaaaagaacttttagttggtttttaacatattttattttcaaattatgattaatattacctctccatcaagacacgagcataatatacccatcttattggattcccccctctaccgctctcctttaataactacaaattcaataaattcagtcaattcaattaaatctattaattcattaaattcttttaataataatatcaaaagacctttaattataaatcagaaaaggggttcagttggtagtatttattcaaatatttcatctcataataattacaataataataacatccattataaaatgaatcatcatgatttatcattttcaacaattaatgggagtaataaagagaatatccctcttcatcattcaatttcaaataattcacttcataaatctttaacatttaatggcagtccaacaatttcaagaaaatcttcaattaagaaacatttaaggaagaaatcttcaaatagcatgtttaaatcaaatcaatcaattttttcttctcataataatcactcaagaagtaaaagtcaaagtcaaattaatcttaataataccaataatcacagtcaaaataatcataatggtaataataaccatagtcatagtcataatataagtattaatttaaaatctcttaaacatgctaaatcaaattcctcaatatcttcaaattcaatttttaattgtctatcagctaaaccaagtattgattcgatcttcaatttttcatctaatcataatcatcaacataataataataccaataaagaattaggatcaccgtatccaacaaataatatcataagtattaaaaacacaccatctcaaaaaagtactgataaatcattctatttatctgatgatgaaataaataatacgatagtgctaaacaattcatttgagattattggttcagataatggagatgatgatgatgatataatggattttggatctccattacagaaaaaagtatcatcaaagaaaaatattataaattctaagataaaacattttaatttacaacgtcatcaatcattaatgcaatttagttcaacatctaaagatagtgttaagaatttaaattataaaattgatacagaacaattaacatctaatattaatggattaacagttaatagtagtggtgatgatgaatttattttcggtaattcagttttgagtaaatctaatattaaattcattaattcaaatgatgaaggtaaaattccaagaattaatgttgatcaatttaaattaatacttgaagaatataagaataaagataaattatcaccaaatggtaaattttgcaaattttttgatgaactgttagttctagattgtagatttaaatttgaatttgatggtggacatattgaaaatgcattaaatatatcatcatttactgaactggagaatacatttttcaatgatgaaattttatcaaagacaccattagaatttaatagaattagtaaaaaattattaattttccattgtgaattttcctcacatagaggtccaatgaaggcagatcaattacgttattttgatagaagtttatgtggagatttttatccaaatttatattatcctgatataattgtacttgaaggtggatataaagattattatgaaagtgaaaaatcattacataaatcattaagttatattgaaatggatcatccattatttaaagatgaaagagagagaaatttagatttattaagaaaggaaaataatttaagtagacaaaattcaaggaattcatcattaattactttaagtcgtaaaaattctcatagttcaattaaaagtattcaatcaatatcaacgactaataatggtaataataatatgaataataccaatactactaatatacttgatttttcattaggtaataagattgaaactattaaaaagagaccatcaaagagatttttattattagaagatgcaaatacttatgatagtgaatttgataatagatcaatttcaagtactccattaattaaacaagattgtggattatttggaggttttggtaatcaaaatattgatctggataatttaattgaaatcaatggtaataaaagttatgattatgagggtaatcaaaacaataatagtattagtagtaatgatgataatgataatggtaatgaaattgatattgatattgatgatacaattgataaagttaatttaagttcaataaataatgaaggttttaagataccattaccaagacctaaatttaatagaagaaatagtttacatttaaggagtaaaacagtttcatcatttacattttctaatcattcaggatttaacagtgtaccattattatcaacacctgaaaagagtgaagctaaatttaataattcattatttgattgtagttattataatgttaatgaaaattcagaaaataaataattaattatgtatttaatttatttaaaaatgctatgaatatatagatcaatcatcattatttaattgattattattacttccattatatcgtaatttatcttctctacattccctaccaccatttgcaggaattggaccaaatctatttaatggccaaattatccaaactgccttagcaacaaccattccatttgataatggaccataagtattactatcaattgaatgaatattatcaccttcaacccaaatatgatttaaaggtattaaaatttttgatcttgtttcaggatatcttggtataattgaatttaattgtaaacctttaattctctttgtatgaatttgatttggattaattggacttttaatgaaaacaatatcattaatttttaaattatttctaatattaaatttccaaagtaatactctatcctttgaaattgaattatctggattaaatgttggtttcattgaaattccatcaattataccaatatatgcaaaatgttcagaaaataaataaattagaggtatccatgatatgaatttaatagatcgtgttattgtatatgataatattgggttcctttgttggaatttactgtatatcgattgaaagtaattcattatttaaaggaaagagtgtctgtgatataaacagtgagcaattcatcaacatgtaatagattacataataaaataattttcaatatgatctgatctggatggttttacattagtaatctacatttattctttattcaaacaaacaaaaaatgactattagtgaagcctttgagacagtttataatgtaccacttttatgtaattcatgtattgaatcagttacaaaagaaattaagaaaaatgaaggtataaatgaagttaaatgtgatttacagaagcaaacagtttcagttttaggtacaactgcaccatcaaagataattaaatcaattcaagaaactggtaaagatgcaattattagaggaactggatcaagtaattcagcagctgtttgtatattagaagattttaataaatcaattaaagattttaattcaattagagatgtttatggattatgtagaattattaaaattaaagaaaatgaaagttttattgatttaacattaactggtatgaaaccatcaattccatattttgcaagttttatgaaaagtggagatttaagtaatggaccattaaatacaggtgattatttatataaattacctaaaatgattagtgatttaaatggtaaatgtcaacaatttatttcaattccaattaaaatggatgaattaattggtagatcattagttgttagtattgatgaaaataaaattttcatggattcaatggcaggtgtaattgcacgtagtgcaggtgcttgggagaatgataaatatgtttgttcatgtactggtaaaaatatttggcaagaaagaattgatgcaaaggaaagaggtattaattaaagaattgttatataataaacatacatacatgtataaatgaaatgattttatgataataatttagtattcacccttaaatgcattcttattcttctttggtttatgttcattttcaagtttttccatatcttttacaagatccttcttagaatttgaattggaattggaatttacgttaagtttttcattacctgtgttaattaattcatctaattcatcatcaaatgaatctttagttaatttttcttttgcttttccctttccctttccttttttgtttttgcttttgcttttgcttttgttattttccttattacttaatgctatttcaccataatcactatccagaatatcaatttcatcaatttcatcatcaattgaatgatctttatgtttgttattattattacttaaatcatttttcctactattaattgatgattcaattaaatttttctctctactatcaggataatctaaattatgatcaatttcataacttacaaatttactttcccttgattgtcttaaagcagttaagaaaattgttgcaaatattgaaaagcataagatataaattaataatttcttcatttgaggtgataaatttctattaataaaagtatcttgatcatcataatatttagaatatttactctttgtaccttttttactcttccccttattatccttgggtttcatagcataaggtatatcatatttcgacatttgggaccagtgataaaagaagacattcaagaagaaagagatggaaggttctagtaaataaaaatgaagcgcactattaataataataaaatgggggaactctcggagtagctctataaaaggagcatcagatgattttgatgacttattctttctttcttttcttctgttcttttggcaatggacgctgcatttattaatcaattactagaataccaaagggctcaagctgctgctagagagagacaatctcaatacagaagagaaccttctcgttatgttttaagaggtggtaattatattaataatccttatgaatcatcaatgtacaacaatgatccatcaatttattataatattccaacaacaacaacaacaaccactagtgatgaatatccattatttgtaaatccaaatacttatcaaagaccactaccacgtcaaagacaagttagaaaaccacaacaacaaatgtacgttgttgatagatttggtaatttatatccatatgaaggtgaatatgaagaggaagaagaagaagaagtacaacaacaacaacaacaacctgtacaatatgcaataccaaagagagaagttacagcaaatgatatcatcaagatgttattaggtggtgaagaaagtaaggaatcggaaccagcggagaatgaaaagcaaccggaagaaactggtccaacaccattaactagggaaggacttgctgaaattttatcacatttatccaatgcagaatttgaagaacaagcaaaggaagaagatgaaaagaaagatgatgaaggtacaactgctactactattattccaccaccagttattagaaaagcaagtattaaagatacaccaattccatcattaaaagttcataaaactattgaaaataagggagataaggaaaccagtaaagaatcatcatcatcagcacctattattattgatgatgttaaagtatcagcaccacaattaaatcaaaaagatttaccattttcaccagctgttaatatttatgaatttaagagtaaatatattgttaatatatcattaccaggagttagtaaagaatttgttgatattgatttccatccaacaaataatgaattaattattaaaggtgaaattaaaaataaatatttaagtgatgatgataatgaagcaaattcatttattttaaaattaagtgaacaaagatttggtaatttccaaagaattattaaattacctaattatcctggtattgaagataataaaattagtgcaaaatttaataatggtgtattagaaattaaattacctaaaattgatgaaagtaagatagtaaaaactccaaagaaaatttcattagaggaagtacctgatgaggagttggaaagggagagtagtacaggatttatttagattgttgtgtagttattttatttatatgaagaaatttttttaataattgtaatttgagttagtaaaattgttaaaatggtaatttttcaattttaggtggctcatcaagaaagttatttctctttatttttgttctaattttaataaataatcacaaataaaagacatttaaatgattacatagagtttttagtgttataaagtagttaattgatgtatactgtgttatataaagtataaaatgtagttggtgatagagattatcacaacaaaacagatgtcatgcatgatgtgtcttacgtaatgacctcaagcatattccttaacaattgaatcaaataattgagattttgaattaagatcattaacataaggagaatttgggaattttgaagaaatttcatcaattaatttagatctttcaattgaatttgaagtaatggaagttaatgagattttattaattaataaagaataatcatatgatggattagaattttcttcttcattttcaattgattttaaaatttctaaagattcaggtatattaattaattttaaatgacaagcaaataaattaattttaatttttaaagaatttgtatttgaacttgaatttaattcatcaaagaaataataagaattttttaaatttatattatcattaaaatttgataatagacctaaccaagcaaatgcaaattctaaaattagagaatctgaataatgagattttaaatcaattaatttattaatatattgatcaatattatttggataattggtaaataataataaaatataagattctaaatctaaatctggatttttaattgaaattggaatattttttaaatatttatttttataaattagggcaagtgaaggtttatcattatcaattaaatttaataaatcattatccaattgattattaagatatgagataattactttaatatctaaaataagggtattaaatgataattcatcaatttgattattctctttagcaattgatattctattttgtaaaatgtttaataattctaaagcatcattattttgatttaatattataaatgaacgaattttataaaaatttgcttcaaaatcgtataagatatttgagaaatcaaattcattaattaaattaagagaaattatatctttgaaattacctgaataaaataattgaataattgtataaagttctttctctggtgttaagtacattgtttggtgaaggaattaggtggtgtttatatctttaaattagggataatcgacatgtagagggtatattaatagttaaattgcgcgaatagaataatgtcttacgtaataactataatgaaaatgaaaagcatttaaataacataactaaataaaatacaaaattatatataggataatataggggtatcaataagaatagaagtagagaaaggatctaagattatgatctttcacctcttaatcttcttgctaattgaatatctttcttttgaatagtaactctctttgcatgaattgcacataaattagtatcttcgaaaagagaaactaaataagcttcaacagattcttgtaaagcaccaatagcagaagattgaaatcttaaatcagttttaaaatcttgagcaatttctctaactaatctttggaaaggtaattttctaattaataattcagttgatttttgaaatcttctaatttctcttaatgcaacagtacctggcttatatctatgaggcttcttaacaccaccagcagttggagctgattttcttgcagctttagaagctaattgttttcttggagctttaccaccagttgattttcttgcagtttgtttagttctagccattgttgttaaaagagggagtagtaggatataatgatctggtgaggatattatgactattttatattaaaaattgaaaaataaaatttgccatcacagcacctgtactcatttttactcattaaattaattaaaagtgagtacggtagtaacaaagattatgtaatcaacacattacgtaataacaataattacgtaacagtcacgtgacaagaataagattatttctccagtacaccactaaaaataaaaataaaaaaaccgttaaatttttcacttaataaattttcagagtatcactttacgaaaattaaaattagtaatagtataatattactgtcccgcacctggctcattccattttattccattttattcagcctgttctgattgttgttgaaaaatttgccttttaatcttatttccttcacttcttcttcttcttcttttctttcccctttcctttaacaacggcctctgttcatcatataatcttaacccagtataatctttgctctatttaatatatttatattatttattgcttttatctggtgttattatccctttattttacttaactcattattataaaatatacaattcataaaaaaaatttcgatcttttaattaagtattcgaatttttgattaatatcttattgagtcgtttaatttattcatatattataattatacaatattatcatgtttgctccaaattattatcaaaataataataatattattaataataatattaataataatattaataataataatcaaattattactcaacaacaaccaaatggtggtgtttcattaattttagattatgatattaataaaatggttaaattcttatcttggatttcattcagtctattaactaataaaaatttaaattcaaattcaaattcaaattcaaattcaaatctaattccttcaattaatttccaaaattctcttaattcagttttatctgcaactagattaccaaaatcaactattttattatcaattaattatatttcaaataatttaaagtttataaatattcaaaatgattttgataatgaaatttttaaaattttaattatttcacttattttatcaaataaatttaatgatgataaaacttttaaaaataaatcttggtctgatgcaactaatttacctcttgtggaaattaataatttagaaaaaaattggttatttaattgtaattatcaattaaataaaacagattcttatacaatggttgaatcttgttggaattcttggattaaaaatgatagtaccattaatcatacttcaattgaaactcctttaactccaatttcttcagttccttcatctccaatttgttataataataataataataataactattatgatgataattattataatgatttactttcaaatgatttatcaaattatcttaatgatagtactactaataataaccaaaatcaaaatcatattcaaaatcaaatatttgaaaatcctttccaaacatttaataataataataataacctaaatacatcaaatttacatcaaaattataattactataattataataataataataataataataataataataataataacaacaatacttacatgatgtcatcaccattaaatgattataatttacaattacaaatgaatatgcaaatgcaaatgcaacttcaaatgcaaatgcaaatgaatatgaatatgaatatgaatatgaatatgaacatgaatatgaacatgcaaaattataataataatactccttattattacaattataataattattataatttaaataataataattcacaatattataattacaaaacaactgcttgttagaattattggtttttttaaatttaattatactttttttccaatattaaaatgttttacctacatttcattaaccagttaataaataacaaacaacaacaactttcttttttaataacttattttattttctttcttttctttattttattttctttcttttcttttctttattcatatacttttatactattataataaacatgaaattgaaaaaaaaaatatatatgtaaattttcctcgcactttataaccattccccatctctcccccttcacttcttcctttaggcaaaccacaatcatgtcaattcaaatgaatttagtatttacattattaataattgaaacaattataatttcaattttattattaccattaccacctaaaattcaaaaaaaattaattaattattatgatttatcaattaaaaatgcaaatttttcaattattttaattttcattgattcacttgtatctataatgtttgttgattcaattaagaatggatttaaatttaattcaagtgatgaaataattgaatttaataaaaatatttgggataatagaagtaaaaaattttatagtcaacgtaatatgtacattttaggtgcaattttatcaattcaaatgttaatttggtttttaattataatgattaaatcaattgttaagaataagaatgttttattacaattaagtaaagaggaggaaaaaagtgttgataatgaattaactacggaatatgagaaattaaaaattgatgtagatacattaaataaacaatatgattcactttggaaagcatatagtgaaaaaaataaaaatgaaactacagaagataataaaaaggataattaaatcagaataattttagtttctttcttcgccatttatatatctatgtttagtatatatcggagagattcccattgtattgaaaaaaacaaattaatcatcatattaattagaaatagaaaaagaagttgttataaagaaaatcgagcaggagagaagtactggaggaaacacctctctatttataaaaaaattctttatagtgagggtatcatcatttaaatagggttttattcttattcttgtgtttcttcttagttttcttctttgatttcttattctttgtattactttcttcattataactaggtggatcactaacaggtgtagtatttctaactggtttctcacttgaagttccaattatattgaaaaatgattcatccctattataattataatttggtggtatttcatcacctttatcaagtaatatttctttaccattttcaattaatttattataaattggtggagcaccaataattccatcattattattttcacaaaatcctaattttttaacattaccttcaatataaacaaaacctaattgacctaaattaacattaattttagtagtattcgtaacactcccattaattgatttaataccaatacatggataaagattaaatttaaaatttttaataatttcataaattaatttaccattatgtgtaaggaaaatactaccagatattgatctataacctaaacctataatatcaccttcatttaattttggtaaaacaatcatttcaatttcattattttgtaaattattattaattttattagttaaacgtaaattaccagttgattcaattgcaaatgaatatggtaaaattccaggtaattgataattaggataattaatatcacttactaatccaattgataataaattatttaattcattaaattctaataatttacattcaaaataaattatattattctttctattgaaagttggtattggtaaattaagtattgttgaataaatagaatctcctaattttgatttaaaattaatttctataaggtcttcaattataaatggtggtattttaggtataatttcccaataattaaatcttttcaataatttataaattgaattattattaaaatcatctaataatgtatctttaattaatgatgtagtttcatttatatcttcttcttccgcttctagttgttgtaatttagatactatagtatttatttgatcataatattcttgaaaataaaatgcatttatacctctatctctaattaataaactttcagatgttatattaattaaagttattttattctcaataagtttaatatcatttattttacaataagctattgataataaataagttaatttttcaaattgtgttaatttattaaaatcttcaaatgaaattaatattttacgataatcattataattaacttttaaattatttggtaatttattttcattattaattgaattagtggaaatttcttcatcaagacaataatgtaatgtataaataatcagacttaatagtataattacaaataatgttgttgatattatcagtataattaacgtcattgtttaaaagaaggggagatgagatcaagtatagaaaattattatgcgtatgtatacgcaatgtatattatttattacaggaattttatataaaatagaatactatataatattataattataataacatttctaatggattttcaataatattctttaattctttcataaattcaccaccttttgcaccatcaattactctatgatcaaaagtacctgtaattgtcattacatcatcaaagacaaaacctaattcatttgccttatcaggtacagctcttttttcaattgtaccaattgctaaaattgcactttgaggtggatttaaaattgatgtaaacattgaaactgcatgatttgaacctaaattagaaattgtaattgtaccaccttgaaattcagctggttgtaatttattatcttttgccttctttgctaattctttaacttcatttgaaatttcctttaatcctttagtatcagcatttttaacaattggagtaattaaaccagttggagttgaaactgcaattgaaatatcaacatttttaaattgtctaataacattttcattttctaaatatgatgaattagtttcaggtattcttaaagttgctttagaaattgccttaactaataaatcattaattgttaatttataattaccatttgaagttgcattaagagattttcttaattttaataatttagatgcagaaattgttgatgaaacaatatattcaggtgctgtttgttttgatgataataatctctttgagatagtttttctcatattagttaatggaatatcaacataatcggttgatggtgcagcagcggtaggttcagcagcaggtgcagatgttgatttaacaatttttggttcttccttaatattatcaagatctttagcagtaattctaccacgaggaccagtacctttaacaccttttaatgataaacctctttcaagtgcaagtttctttgctaatggagaggcaataattctatcagttgaatattgcggggttgattttgataccggagcaggatcagccggtgcagaagaagatgaatcagctttagctggtgcagattcagaagcagcaggtgcagcaggagcatcaactgaatcaccagcatcagcagcggtgaaagaatcaaaagctgcaacatcatcagcatcttcaacataaacagcaattggtttattaacaggtatattattagtaccatcattaactaaaattttagctaaataaccatcatcttgaaattcaaaatccattgaagctttatcagtttcaacttcagcaattgattcaccaggagataatttatcaccaatagatttatgccatttaattaaattaccttcagtcattgttggtgataaagcaggcatattaataactgtatgagaagggaatttagaagcataatttctaaatgattgatgagtaaatgaaagtaaacatctagagttacttcttgagaatgcaatagatctgttaattagtagtgaggacattgctaaaagaagtgagttgtagataaattgtaaactttaaaatgaaaataccagtattaaataaaattaataaactccccatgggaagaggaggtccgaattgagaaattattttcttattattgtcagagtcgatgcgccggtcttttatttgtctattttttattttctattttctatttttctatgttcatgaatttgttgaagattggtttattatatattataccacttcttcttttatcaatcacaatggctggtcttaacttatcagaggaatcaaaggaaagattctctaatttattctcttctgctcaaactatcgttcattacggttggttacctttcgttatttatcttggttggtcttcaacttctaattctaataaaccaaatttagtctctttattatctccattaccttctgcttagatcttgtatatatatataactacctatttataagaaactacataattctttaaataacatacttattggtaatccaacacaattataataatcaccttttatacctttaaataaaatactaccaaatccttgaattttaaatccacctgcaacttcaaatccttcttcacttttacaataattttcaatatctttattactaattccttcaatcatttcaatttcactaatacattgaaatttctttatacttactttattatcctctctctttaataatgtacaacatgtaacaattttaattttatatccttcattttgtaaataacataattttttcaacattttaacattattttcataattacctggtttttcaaatatttccccattacttataataactgtatctgctgataataatatgatattagcatcttcctctatactattataaacatcatctaatttaccatatgatgtatcaataacatattgaatttcattacctttatattctaatttatttaaattttctgggaaatttgattttttaataattggattaattccaatttgctgtaataattctaatctacgtggtgatgatgaacataaaataaatttatatttatctaatttattatataatggatgattaaatttcatttagaaaagaaagaaagtatataaaaagagagatacctaattaaatatttgaaatatcaaaatctatacctttagaaattaatttttcttgctttgattttaaatttgttaaatgattttcatttaatttattccattcatcaattgatctacccttttcatattttctcttattaattttattaaatggaataattttaaatttactatttgcaccaataaataaattttcatgaattttatcatttgttaataatgaaacttttaataaatgtcccataagtaaataattattcattgtttcatatgcaatttttgcaacttcaaattctttaaattcaataaatccataatgtttactttgaccagttttcttatttcttgataatcttaaacgtgtaatatcaccaaattgttggaaatatttctttaattctttttcttcaaatccttttggtaatctaccgacataaataacacctctttgattatctgatttatcaacagagattttcttttctttattagaacttggtttaataattgtatgtccattttgtgtagttgatgatgatgatgatgatgatgatgatttattaactgattctttttcatcattttctattatatcattatgtatcactaattcagaatcagtttcttcaccatcatcactatcagaaggtaattcaaaatcagcttccttttcagctgcttccttttcagcttcttcttcttcttctttcttttgcttttcaattcttttctttaaattttgtgtctttttatcattattttttataattttatcatttttctctaattttttagttttagcagatttaatatttttggtaggtttaactactttattagaggtatccttactattactattacgagccattgtactgtccactgcagagagagaaatgaaaaatttcagtaaaattccagtaaaataaaaaaaaaattatataaaaactataatagagtgaaaattttttttatctctcttcttccacagacgcgccgcctcgtttagattaactgaaaagagtaataacttgttccaacatttatcaacgaatggaagtttcatcatttttgattatataaggttatctacgtgtttattttcttaaatttagtttcttctactacttctctttatcaacaacaatgtctgctaaaacatacacatttgaacaagttcaagaacataaatcaagggatgatatttggattatttataaaaataaagtttatgatgttacaaattatttagatgaacatccaggtggtgaagaagttatacttgattgtgcaggtgatgatgcaactgatgctttcgatgatattggtcattccgatgatgccgttgaaatgcttaatggtttatttattggtgatttaattggtggtataaagggtaaatctggtgatactttaaataaaacttcaaatggtgattcaaatatcgtattattaggtgctgtaactgtcgcaattgcaataatcgcttatttcgttttaaataaataacttttgtcagttaattatataataattgtaaacataaatacataaaataatattaaaaaaatgaataataataaacctactcgatagttgttggatctcttttagaaaattctaaaattaaatcatcctttgggaaaattgttgcaaaaactttaatttcttcacttaatggtgtaattttatgtttaaaatctgtaaacatacatgctttaccaattaatgcagtaaaactcatcataacatatgtttgacctaaacaaacatgtgtacctgtaccgaaaactaaccaatttttctttgcttcccatgctgaactaccttcaacccatctctctggtaaaaattcatcaggattttcataaacttcaggatcatgtaatgcaggataaactgatggtataatcattgcaccttttggtactgtataattatctgtaattggatatgcctttttagcaacatatggaaccataataactggtggtctatatcttaatgtttcacgtacaaccatattagtatattccattttatcaattaattcagatgttaatggtaaatttggattaccatttctaattcttaattgttcttctctaattttttgagcaatttcaggtctatcactaattaattgaaataaccaacaacataatgatgatgatgcatcttgtgatgcaaataaaaatgtgaaaattgcttctgaaatttccctatctgaaaataatctaacttttgccttaatttcttcttcaccttcatttaatttaatttcaccattagattgatacattgataaaacccatgcatccataacacaatttggctttttaccatttaaaatttcctttttacacattgttgcacatttttcaaaaattttcattgatttatctgcaattactttaccataccatgtctttgtgtatggtataataattgggaaattaactaattctaaagctgctgtaactttataataattatctgcaatcattttaatttgttcttcagtaatataatcaccacaaaaagttctaagtgaaattgcacacatatattctctaaattcagggaaaaatggtattggattacctttactaacttcaacaaatttttctaaatatttatccataactttttcttgttcaggtatataatcttctaatgctttctttgtaaataatggattaagaccttttctataatcaacatgagctttaccatcaaggaaaacccaattagttggtcttaaaattttaactgcaacatcaacaacacatggtttaacaaatgatggtgattggaaaatttttctagctaattgagtatcacttgcaataacgacaaatttatggaaaattgaaacacatgataatggacctgaataccatttatctttatattcttcaaatttaggatctaaactttctaaaaatggtccaataaatggccaaattttatattttggaccaacaatattacctttataaatttgatatttaatttgatcataagtaattgcaattactaaaaatgaaactaaaatttgtaaccatgaaaatgattgaaatttatccaataaagataagtttgaactttcaacaaatgatgtagttgtattatccattacctccattgttaataaacgaacagcaagggaaataactcaaaagaataaaagaagatatgatgtttgtattataaaaacattcagtaaacagtacagtttcttaattataagatgattttccaaagtgaggaaaatttcaaatttatttatacgagttatttatacgagctatacgagctatatatacgatgacttttatacgacaaaggacaaggtatcgttctcatagacaacattgtaccagatgacggtaagtatcagagtgaacactagttcaatagagctggccattatacttgcttgaacggttgaactgaaaatatatgcaccaaatataattattgagaataaaatagttaataggataattgtaataatgtagatattcttgattttcttatcagtgattgacaatatagttaataatgaacataggaaacaaataatcataattataatgtattctgcatatataagattactgaggaaatctctctttgattgtccaataagtgaataaatatttgatgattcaacatcatataataacatttcaatacctaatgtaataacaactactttagcaattgaaatcttcttacctaaattagaattaataccaccagttgttttaaaattaactaaccatgcaccaatactaaataaaattaaattataaatcatccatgttgtaattaatgttgacattgttaatgataataaattagttaatggtacaaagaaactatttgtattataaccaaatttatttaatgtataataatttgcagcataagtaataaataatgatgaatatgaccaataaaataaaataaatttatattgtataatatatttcctttgtttccttaaattaacattatcaattgtaattgaagttttattattatcaaattttaatttattatgaattaataatgataaaataattgcaattataaaataaataattgcaaaataaattgatgaaaacattctactaaaatcactaactaataaattaccaaatgcttgaatccaatcaacttcaacaataaaatttttttcattaccatttgaatcttttataatttcacttgttaaaaataatacacaataaacacctgaattatctaattgataaatatgatcatcaccattagaatttaacataaaactttcaattggatatttataattatttgaatcaattaattcacttaatgataatttttgtttatttgattcatcactttcatgttcacaataaccttcatttaatgcaaattcatcacaaattttataataaggatttaaaccaattgttgttttctttaaatcttctccacccattattaatgtataaatatttatattatcattattaccattatttgtatcagggaaatgaattttaataattggatcaaagtttttaaattttgattgtataaaaccttcagcatttgaaatatatgcacaactttgtaatactttatcattatgcagagaataataatcaactaatgaataaacatatgtaatatatgttaatatcgagaatataattgatcccttcattggattatacagtatatatttggaaaaggaaacagtgttttacaggttcaaaaggactacttgatgatatagtaacgtgttgattggactaaattttttctaatgttcccaatgaggaaagtctagcgaaatacaaataggaagttttacacttttattcttttatataactacacaactaagaactttcagactgtaagaccttaaccgttataatataatagatacttagagggttaaattcacgtatttaactcattttactaatatattattactatgtgattgtttagtttttaattatatttgacgctaatcaaatttataataaatacattttttgtttatttctattgttccagttgtattttcataaatttgataaattagtgtggaaagttttaaagatgttattcaggatgtattgtagtaataagtaggatatgtaggataaatagaataagtaggataatgtacaatcgattggataggattaattcgagcggtagcaatatttaaaaattccgctattaaacttttattaaacaatagtattaatagtattaatattttaagaaaaacttacatcaactgacaaaataatagaaatggaaaaattaattaatgcctatatcgataacgtttattttcttattgttcaaatatactgggaatttttaataaccttatttcacgtagagaattgtctcgtattatatatgtgaactatctgatttgaaattaatatacatgtctcttttaccgacatatttatgagttcgtctattttcttaatatggttgctgccacaaaattatatgtgtgttgataatactacatgtaagattgtaaatttgaactctggttaatagcatgtgtagtttgtaaagaaataactgttttgttttgttttgttttgcttgtttttacagtttttaaattttgcttttcattttagtgtttgttgattatacatcatctgcttactttatttaatttaaaatatccgtagagagctgtatattcgattagaaaatgaatttatggtataaaaggcaaacaaagtttgctattattacttgtttaattatatttgcatttatatttacattaactggtttaagttatagatatagtaataataaagaattggtattaaataagaataaagataatgttaatgatgatattaataattttaaggaaaaaattgaattagaggaagcagagaagcatcagtttgaattgaataaacagaaagaggataatatgaaagaaattaatgaattgattagtaaattagagaatgaatttaaaattgaaaaggagaaacttgaaagtgaaaagaatgaattagaagagaagattaaagagaagcaatacactcaaaaactttatgataatttatcagatgaagaaaaagagattaaaaagattgaatcttttattgaacaagatagccaaaaggataaattattggaagcaagacaagaatattttaaaaatgttttccaaaatatacaaactttcaaaccaagtatatcaccattaaaagaatatttagaagcaggtaaattaaaagcaagagattcaaataaatttaatgaaccatatttaacaagagatgaattaaataaacatcttaaagttacacctgaagcagttaaagatttaaaatttaatcatgaaggttttattaattcactaactaatgaatatccaaataatatttatcaagaaggaatttcaggtattgttttcgttggtggtacaaaattttcttggttaacaatgttatcaattatgaatattagacaacatggatgtgaattaccaattgaagttttaataccatcaatgaatgaatatcaatttgaaatttgttcaattggattcccaaaatataatgcaagatgtatttttttaccaaagttagttggagaagaaattaatgaatattataaatttcaaggatatcaatttaaaagtttagcaatttcactttcaagttttgaaaatgttatgttaattgatgctgataatacaccattaattaatcctgaaataattttcaattctaaattatttaaagaaattggattaattacatggccagatttttggaaacgtacaactaatccaaaattttatgatataattggtaaagaaattgatgataataatattagtaaacgtagagattttggatataaagaatatggaaatattttcaagtcaatttgtccagacaaaattataccatttcatcattttgaaggtacattacctgatccaacaagtgaatctggtcaattttttattaataaaagaaatcattataaatcaatgattttaacattatattataattcatatggaccaaattattattatccattattatcacagggagcagcaggtgaaggtgataaagaaacatttattgcatcagcacatgcattaaatgaaaaatattataatgttaagaaaaggttaatatctataggtagaatgaaagaaggtgaatttaatgcaaatgcaatgggacaatttaatccagtacaagattatgaaataagtaaaaaatataaggaaagtaatgaagaagttgatgaaatacctgatttatttatgttacattcaaataatcctaaattaaatccatggcaattatatattaatgaatatatttatgataaagaaagtggtaaaaggtatagaatgtatggagaagatttcccacatagggttaaatatgatcatgaattaagaacatggttaaatatggaaaaattgctatgtgaagatgattttaaatttggtgtatttcaaagtgagggtgtaagtaatgatgaagtttgtcatgaagtacgtaatcaaattaaatttttagaaactgtttaagagggtatataatagtaatacgtgtaaagtaaagaataattgtagagttaagagaaatatggtgataagaacccatttgtttgtaaattctttgcatagcaaaacatcaaattcctattaaacaagcagtatttgcaaagcaacttttcagttttcaacccttacgtaatcaacacaaacagtcacgtgacagtgtgcaatgcccacacatctagacaattcccttattaggaaataccatagaatacactatgcgccacactgataaaataaaaaagctaataaaaaatttcggactctgtaaaagaaaatatcagtgattcactaaagatacggggatcatttacaattacatgatatttcactggctcagcttcagggttatggtataaagtatttattcttggtgggttttctctcttttttagtatcttctttttcttttaccatcttccctagacaactactctcttttcgtaaaatggcacagagacaagaactagcattggctagtattgggtccattttatcaactatctcagattcaaaattatttttagttgatccttcaaataatgatttaaatttcaataattgtgaaaaattatcttcaaatgattcacttactttcattgatgaaccaaatgcaattgttactaatttaccttcatcaaaattaattcattcattaccaattttattgaaaaaggaaaaggaaaattcaaatatttttaatttaaatattaaaatttcaaataatgattattcaattataacttgttgtaaagatttaggtttccaaatcctcatttcttcaaatattagacaatcaattgattttacaatcttatcttcatttatttcaaaattaactagtaaatcagttttacatttttatgttgaatcaaatgatttattcgatataacttattatactactaaccatattaataaagtttattctcaattaactacctctcctgattcagattcttcattaactgatgcatttaatgctttaaagacaattgttggtattcaatataatgaatttgaaattttcaataataattctgcttcatctacagcgaagaaaaatttagttttattattaggtaatccaaatcaattattatcaaataatgaatttattgaaaataatatcttaatttcaattaatgtttatagacctttcaatttattgaaattaaatgaaattatctcttcattaacttttaataaattattaattgttgaacaatcttcaattaatttacaatttcaaaacttattccttgatttagttgaaattttatcaaatgattcattgaaaaatattgaaattattccattccaaattttaaaaattgataattcaaatattgattctgttgttaaatcaattaattcaatcgaaaaatcatcatcatcaaacttaatccttggtaaatcttttaatgaaaataataactccactaattcaattgaagttttcgaaaaatcaactgatggtgcttatttgaaaattttaaaagaatcagttacttcaaatgatttaactttcaatcctttaaatgttttaaatgatttccaaattaattcatcaccagattattctttaggtaaatatttagctcatgaaaataaattaaatgaattaattaaattagttgaaaataatttatctcaatttaacggtgatttaaataatgaattaactaactggcttattaaggcaagagatactggtgatatctatgattcaactaaattaattgaattattaaaattaaataattctaaatttgcaattgaattattagaattttctaaatattttaaattatcttataattggattattggttctgataattggagttatgatttaggtttatcaactttccattctgttttaaaatcaaataataaaagattaaaattattaattattgatagtgattcttcaattaacattaaacaaggtaaaaaaaatttaggtctttatgcaatgaattataaatcttcatatgttgcatcaattgcactttattcttcttatactcaagctttaacttctttcattgaagctaatgaatattcaaatggtccttcaattattttagcttatttaccaaaatcaaatgattatttagaattattaaaggaaactaagagagttgttgatattggttattggccattatatagatttaatccaattttaaataatgattcatttaaattagattcatcatttattaaaaaagaattaaaagatttccttgatagagaaaataaattatcattattaatctctaaaaattcaaaattaaattataatttaaaatcaattaataatagaattaatgataaaattaatgaaacttctaaaaatgcttttaaagatttattagaaaaattaagtggtgcaccaattacaattgcttatgcatcagatggtggtaatgcaactaatttagcaaataaattaaatagaagagctttaagtaaaggtttaaaggcaaaaattttattaatggatgatttatcaatggatgatttattattagaaactaatgttgttttaattacttcaacttcaggtcaaggtgaattcccaaatggtggtaaacttttctgggaaaatttgaaaaattcaacattagatttagcaaatgttaaattttcagttttcggtttaggtgattcaaaatattggccaagagctgaggatgcacattattttaataaacctgcaagtgatttatttaaaaaaattactaatttaggtggacaatttttaaatgatttaggattaggtgatgatcaagctgatgatggttataatactgcatataatttatgggaaccaaaattatgggaatcattaggtgtttcagcagataatttagatgaacctgcaccaattactaatgaagatatgaaaattaatagtaatttccttagaggtacaattgctgaaggtttaattgatgaatcaactggtgcaatttgtgcagttgatcaacaattaactaaattccatggtatttatatgcaagatgatagagatattagagaagaaagaaagaaggaaggtttagaacctgcatattcatttatggttagagttagattaccaggtggtgtttcaacacctgaacaatggttaaaaattgatgaattagctgatactaatggtaataaagattttaaaattacaacaagagcaacttatcaattacatggtattattaaaaaagatttaaaaaatacaattagagatattaatacaactgcaatggatactttaggtgcatgtggtgatgttaatagaaatgttatgatttcagcattaccaacaaatagacatttacattcacaaatggatcattcaagtaaattaattagtgctagattattaccatcaacaactgcatatcatgaaatttggttaactgatttagatgaagtttcaagaggtattgaaggtaaaccagctaagattaaaattggtggtgatgcattaattgatagtgaaccaatttatagtccagtttatttaccaagaaaatttaaagttgttattgcaatgccaccatataatgatgttgattgttgggctcatgatgttggattaatttcaattgttgaaaataataatataattggttataatgttttagttggtggtggtatgggtacaactcataataatgttaaaacatatccaagaactggttcattatttggatttgttaaatatgatcaagttgctgaagtttgtgaaaaaattatgattgttcaaagagataatggtgatagaaagaatagaaaacatgcaagattaaagtatacaattgatgatatgggagttgaaacttataaggaaaaagttgaagaattattaggatataaatttgaagaagcaaaaccttttaagattgaatcaaatattgattattttggatggacaaaggatgaaactggattaaatcattatacatgttttattgaaaatggtagaattgaggatgttcaaggtaaaccacaaaaaagtggattaaagaaaattgcacattattttaaagataataaagcaggtgttttcagattaacaggtaatcaacatattttattaagtgatatacctgatgaacatttagataatattaaaaagatgttacatgaatataatttagataatttagatcattcatcattaagattatcatcaggatcatgtgttgcattcccaacatgtggtttagcaatggcagaagctgaaagatatttacctgttttaattaataaattagaggatgaattagagaaattaggattaaagaatgattcaattgttatgagaatgacaggttgtccaaatggttgtgctagaccatgggttgcagaaattgcattagttggtaaatcttatggtttctataatttaatgttaggtggttcatatattggtaatagagttaataaaatttataaatccaatgttaatgaagaagaaattttgaaaattttaattccaatgtttgcaagatgggcaaatgagagattagatggtgaacattttggtgatttcgttattagagttggtataattgctgaaactactgaaggtaaatatttctgggataatgttattgaacattaattgatataattatattctctattatattctctatgtatttttaatattttataaataaataaacactttatataaaaagataagaaaaaaaagaacattctacttacttttgcttttgcttttgtttttctaaagacttaataacacttactaatgtaagtctatcattattagttaattctctttcaatatttaaaatatcacataatttaacatcccaaaattttcttaatattttattaagtctattattaaattttaaatgaagtaatgaaatttctgaatcaacagttttcataaacttaatttctcttaattttaattcattctctaatctagatattattttatccttctgttgtttagttagtatacgtttagtattggtattaacactgggagaggttttaaccatttctccattgccaaaagagaagagtaaacaaagtggtaaaacatgtgaatgattaagtaacgcgcatttacttaatattttaatatttcagacattaagttctttattagaggttgatatagagtggcaaattagaatataatagacacaggacacaggacaatggttttagaggcatgtatggtaattattgataactctgaatatatgagaaatggagattataccccatcaagatatcaagcacaattagatacagttgaaattatctttagaaggaaaactaatgaaaatcctgagaatgttgttggattaatgagtaatggaggtagttcaagtttatttttaagtaatttaaccaatgattatggacaaatattaagtggattacatgatagtaagattgaaggtaatgggaatgattttattaattgtattgaaattgcatgtttaggattaaagaatagattaaataaaaatcaaagacaaagaattattatatttattggatcaccaattaataataatgaagatgaaattttattattaggtagaaaattaaagaagaataatatttcaattgatattataaattttggtgaacatgaaaataatttaagtaaattagataaatttattgaaattgttaataatgaagaaaaatcttcacatttattaactataccacagggtccataccttttatatgaacaagttgataaaagtgcaattttaagaaatattgataatgatggtaatggaaatggtaattttggagataatggtggtattggagaatttggagattttggaatggatgatccaaatatggatccagaattagcattagctattagattatcattagaggaggagaacagtagaaaggagagagaaaagagtgaaactatggatgaaagtaagtaagtaagtaattatataaagagtatccctatttgaaaaaagaagtattttatattatattattatcttatccttttctttatgttcttttctttatgttcttttcttctcttctcttttccttcactaagacattgctattacaaggatgtctgttagtgttagtagatcagaggaataccgtaaagttgcatcaagtaacaataacatcaattctgctacgcgtaaatatcatcgtaatagcaataaaaaggttaagaatagtaatagtaataataataataacaataatattgtagacatcccattaattgaatacaaagaatgtaatattgttgatgcaccatttactaaagaaatgttttatgaagcatattctaagggaaatgaaaatatttcaattgttgaatgtccaaataatttaaataaagttgtattctttaaggcacctgaaagttataatgaaataaatagattaaattatgttgaaaaatatatgaatttaccacattggcaaaagaataatagatttaatatgttattaaataaaatgaaagaattatttcattgtaatggtagttcaattagtttaattgatagtagacatcaaataattaaatttgagaaaggttatggatttgatacttgttcaagacaaattagtattgatagtcattgtatactttcaaaagattttttacttatacttgatacaagtaaagattggagatttaaggataatccaattgttaaagatttcccattcataaagttttatcttggagttccattaataactaaggaaggttataatattggagttttatcaatttttgattcttttagtaaaaatgaaattgatgaaagtataattgatataatgattaaaatgagtaaagagattatggaatatttagatagtaatgttaaaattaagaataatgttagtaattcttataataataataatagcaaaaatgatatatcaaataaaatgttattaagtacatgtttagcaacatgtaaagatggtaaagacagtaattctcctaatgataacattaagaagatatttgaaatttatggtagagctacaagtaataataagaataattttaatgaaattatatttgaaaatgatggtagtggtaattcatataaatataatagcaagattaaatttactaaagattgttcaatttatgaagattcgattgatttaaatatttggaataagattagtaaacttggtaatggtaatttcaccaaggcatgtaaattagtttgtgaaagtattgttaagaaattaaattttgattgtgtttatatacttaatattaagaataatgaaatggttttaattaaaacatcatcaattaattttaaagatagagagattaaattaaaagattatcaagatgttccatcaattgaaagaaatgatgaatatgaggaagatttaattgatagcaagagtaaagttattagtatttataatgaaaatggtgatgataataatgaaagctataatttcaataatcaaagagaatttcataatagatccattaagagtaataatggtattgtttattataaagttactgaagataataatgaaaccatgattaaatataagagtggtattagtttaccatttttcaaatatgatactagattagttagaaagcaaagaatgaagaagattttaaatgataagattgaatattttattaaagataatggatatttaattacatgtttaaatgagaatagaagagatataacagaagaggagattggatatgtatatggatgtgttggtattcttcgtaagatatacattcaagagtagggttatataataatacataatatacatagatagatagatacacaattttatagattaatacttagatcgtataatttgatcttattttgatcatttggatgaacctgtattagtttattggtaagtaggaatcttatgagtggatcatccaatgtagatactttaatataagttggatcaattgaatttggatttaataagttgttatttaataataattgaattaatttgaggaaactattacgtttatcagataagttagattttggtagtataggtttaagttctaattcaaatatgtagtcaattattatttgacggatgtaggatgtaagtctatgattagagtctttaattgattgtatacgttgtaataaatgttcatgatcattattattattattattataattataattattattattataattattattattatctatatttatataaggttgagatgtggggatttggtataaaaagggaggatattgagtatttgcatttgaaagtggtatattagagtgtgtagtgggttgtacagtggatggagggtactccaatctctccaacagtgccagtatttccaatctactcattatccaaagaaagatgtaatgtcttgtatgtaattaaataatttttcactctctatacttcacttcttcctttaagacaagatggaatcagtgcaacaacaggtaagtcaactaagcgcagaggcacagaaggaggtattagccttcatccagaaggaatcagcacaggccaagatccagtccagtgttaccagcttcacagacagatgtttcaccaagtgttgcagtgaaggtagtggcagtacagttaacgcagtggaagagcagtgtctgcgcggttgtcttaatgcattcttagataccaacatcaaggttgttcatatcttgcaatctatgcagaagtagtgtatgtatatagtgtatagacctgtttataatggataaatcattaaagagaagtctaactgatcgtatatatgaaaagaggaaattagctgcattggaattagaacatataatctctgattgtattgcttcaaatgattttgacaagataaacaatataataactcaattaaggaatgattttgcttataatattcatgatccatatgcaagatatggtggtttaataggtttagctgcaatttcaattgctttaggttcaaatgaattaccaaaatatcttaatttaataattaatcccgttattgcttgctttggtgataatgattcaaatgttagatattatgcctgtgaagctttatataatattgctaaaattgctaaaggtgaaatattattatattttaatgaaattttcgatatattgtccaaattagttgctgatgtagaaaatagtgttaaaaatgctgctgatatattagatactttaattaaagatattgtctgtgataaagcaactaattatatcagtatcattaataacaatattgatataattgataataattcaaatattcaatcatatgaacaacaatcaacaaaggctttttcattggaaaaattcatacctttattaaaggaaagaatttatgcaacaaatacttatacaagattatttattgttagttggttaattttattaaattcaatacctgatttacaattaatttcatttttaccatcattcttagatcctttattatcttatttaaaatctccattgaaagatgttaaaattttaactgaaaatttcctaaaattattattacaagaaataattaaaattaatgaaattaaattattaccaattaataatgataatattgaaaatgatatttatatacctggtgaagatactttaattgattatcctaaaattattgatattttaattaataatttagaatcaaatgataatttaattaaatcaatttctctaaattggttaacaactttattgtcaatttccccaaaatcttttaatttattgattccaaaattattaatcattttattaaagataatttcaaataataattcaaatttatcaaatttagctcaaaatttaaatacaaaattaatgaatttaatttcttcaaataattatgattcaaattttaacttacttataaataatttattacttgaattatcttataataataataataacaatagtaataataacaatcatatgttaaataacctttcaaataatcttaaaaataatttaaaaaatcttgataacaaaaataattcaaataataaaaatgatttcacaataaatgatgatgatgataatgatgatgataataacgacaattatcatcgtaatcataacaatatagataattcacataatcttattaaacttaattcattagattggcttataatgttacaagaaaaggattcaattaaatttatggaattaaatgataaaatatttattatacttcttaaaaatctcaattgttcaaataacaagataattaataaaattttaatattattatctaaaattctaaacaattcaaatgataattattttaataattttatgattgatttattaacattatttaaaaaagattcaaatttattaaatacaaaatcaaattttatcatcaaaaaaatttgtaaatcattaaattcagagaaagtttatatttctttaagtcatgttttattgaaaatgtttaatgatgatatttcaaatattgattttattaaaataattgttcaaattttaaataataatttaataattgcacctgagttaaatgatttacgtttaaaacttactaaaaatgacaacaccaatgcagactcaattttattaacaaatttatttaaatgttggtcaattaatccaccttcattaatttgtatttcattattaacttctaattatagtttaagttataaaattataaatcaaatggttaattatgaaattaatataaatacattaattcaattagatttattaattcaattattagaatcaccaattttcgcaaaattaagattagatttacttaaaccaattaaaaatattaatttatttaaatgtctttatggtttattaatgttattacctcaaagtaactcatttaaaattttacaaaatagattacaatcaatttcttcaataattaatttaccaaatattgaaaataataattcaattaatgaagaaattaatcaagattttgataatgaagtattaagttttttcaataattgtcaaacttcacttgaattaatcaataaagatgaaattaataatgaaattattaatgagtttcaaccactggatactagttcaattatataatcattaaccgaatttttgattttgataatatttcaaattattcttatattgtaaactatttgttgaaaactctctattttgtaattttttattaataatactaacttctttaatttctttattatgttttaaaacatttgaataatgttttaatttttcattttctttattaattaatgaaattgtcatttcaccatcacttaatttcctttcatttggtactttttgcttataatatttaatcatactacgatgacctaatttattaccatttgataatgccaattcaacaccagttttatcaattattgcagtaatgtcatcatcatcctccatatcttcttcttcattaaatgtataaaattgtgaaaaaaattctctattatatgaatcttcatatggtatacatgcatgaccctttgatttaatatgttgtctaataccaattaatttattactaataaatccacatttaatacattctttatcaataacaactaaatctgataaataccttattaaaccttcaacatttgttaaaaattctctttcaggtatatataaaccatgattattaagcatatgaaataaattatcatcgattgttgaagaattgaatgaacaataaatacattgagttattaataatggttcatttatttcaattatactactggtatcaatatcagtttctgtttcttcctctgtattataatcagtaagtacctctcttgttgtatctgttaaattaccatcaaaatcagtatctgttttaaaagttgctaaagaataatttgaaatattagaatttatggaatttgttggacttgaatctcttgtaatattagtattaatattattaatatttctacctctatttaataaatcataacgaagtgaatttttaacattcttacctttctttaatttcttagtttcaataagaaatccaaattcatcatattgttcaacttctttattatttgcaactttatgtaaaaattcattatttgaaattggatttaaattaacaattcttctctttaaattatatctatgccattcagatttcatatgaaatctttgactttcaacacttggaaattgaatttgacatgatatacatgtatatgatgtattattacttgtagaatgtggtaaaaacattggtctataatgaagaaaagaagatataaagaaagatatacaaaattattacataatataatcaaaaatcaactggtgaaccttcaattggccaaactcttttaaataattccataccaattatatcttgttgatttaatttactatcaaatgatgctttaaataaaccatgagtacctaaagcttctttaataaacccagatctacccattttagagaataatggaatatttttataagcattaacatcatttgaattatgaaacataaatctaattgtaacaacatttttatgaattttgaaaacttcaccagtaatgacaactcttttagctaaaattcttgtaaaatcactattttcaaatgtaccttgacataaaatttgcatattattaccattattatcacatttaaagaataaagcaggtgaattagtataattaattggtaaaattgcagttgcaattgcaatttgacctttatgtaaaaatctttgaaattttgaaacattatttgaatttctactttgttgtgaaattaatggattaattttatatctacggaaaccatattgaacaatcattgattcctttgatttaattggttcatcataactttcccatgttttaattgaaaaattacaaactgataatttattttcatttggtaataatgaataaattataaatggttttaattttggattaattaatctatttttatcattcaaattgaaatttattgaaattctaattttatcacctgccttaacattaataattttattatattttttcattaattgatttttgaaaattttataatttttatttcttaaataatttaaccaattaattggtcttctttcatcattttcatcataatcccaaaaacatgatgctaatgatttaacacctctatatttagataatctctcagttgcaatttcatcataacgtaattcaatttcatcagggaatatcatttcttcacgttctttctttctatattcttctaattttctttgatgttcctctggtgaatcttctataaagtctgtttcttctatatcttcttccatatcatcctgttcaatatcttcttccatttcatcatcatcatcttgttcattctcatcatcaccttctaaaccattttcttcaattaatttttcaatttcttcatcctttaaccatcttgcttgatattctgacatacctttaggtaatctagttctcttttgtacaacttctttattaactaaattccaatcatcatcatcagaatagtaatctccttcctcctcctcttcatcatcatcatccatttcaatttcattagttgtattatcatcatttaatggatttaatgattctctattatcaggtattataatatcaatattattattttttgaattaattttttcaattttttcaatttgataatcaccaaaacctggtaaatgaattaatccatttatattaaaacctttacctctaactataccatcaattaataaagtattggaattatcatcaaaatttaattcatcagctaataaataacctcttgaatctctccaattaataccttttggaattttttgacataaatttcttaataaattaagtgaatcatttttattttcaattaggaataatttttcaacatttgggaaaaaatgtttataataacttaataaagatttataaatatctaattgtaaattttttttagggaaattttctacaatatcaggtaaaattgcaaaagttgtagaaataccttgagcttcaactgaacgtataatttgttcaccataaattggatcaacttcttcaattgaagataaagcgaataggacaaaatctgaaattttacaagaatctaaaatatcaattaaattattcatatttggtattataaatttaattgttgatttaaatctatcaattgaaattgtaataattttttgatcatttgaaatttcttcattaatttgataatcaattgatgatagaatttgattaattatatttaaaattgataaattatttgttaatggtaaaattgttataattctttcaattttatttgaattaaaaattgaattatcaattaaatttttattaattttatttaattttaattgatttaatttatttttacgatcatttcttttctcaatttttaaagatttattaccagttggtaaatttttttcaattttacccttattttgagctttaattgaacgttttgatgaatgtccacttttaaaagatttattctgtttcttcaaagttgatctatgacctgccattgtatgataagatgggtattaaagctgattccaatagatctaatctttaatgaaaaataattttttttaaaaaatataaaataaaataaatttttcatctatataatcatgaaggtataaaattatttttttaaacccacgtgacaaactccagggccaggtcacgtgcaccaaaccctgcaccactcccgacaccacacacaaacagaaacacagtcacagagaaaaacaaaaagacgcgactgtcccaaataggaaacagagacgcacaattaaaattgaaaaaataaaataatttcactataccatagtaaaatatcgagaatatttcctaaatttttcacttacgtaatacaacaattgaaaaaatactatactcacagtaatttctattatggtgaaaaatttcaatttcaattcatactacatactattgtagaatctgatatatctttaatcttggattccatttactttacttactttcctttcagtgttcgacaacccatataaattaaatatacaatcatggcacacgaaaacgtttggttctcccatccaagaaattttggtaaaggttcaagacaatgtagaatttgttcctcccactctggtttagttagaaaatatggtattaacatgtgtagacaatgtttcagagaaaaggcaaaggatattggtttcactaaattaagataagtatgttgttactaatttaattactatattactatattatattatatactaattgtataaaactaattatttgcaattttaataatttcatcactattaacataaataatttcattatcaatatcttcattaattggtcttaaacttaattttatggcacattttgcaacttcctctccataaactggatatccaattgtactattcaaaaatgtacccctgaaaaagctaccaattttttctgcaattgtattattaattcctttactaacacttctttcacctaataaaatacctggtcttaaaataattgttctcttaaattttaaattaattatatcttcctctaattgtcccttagttttcatataaaggaaattactatccttatttgatcccattgatgaaacaattattgctgttgtaaaattaccattctccttagctgattggaaactactaaaattaatatcatgatcaatcttaacaaaattttcagctgatcctgctaatttacgtgttgtaccaaatgatgaaaaaaatgtacttccaattggaatttccctactatttttaattatatcataccattgattattatcattattaataataatcttatttaatttcttatcttccctatcataatcccttcttgtaagtgtaaccaattccttaacttcactacattcaatagccttactaactaaatgtgatccaactaatcctgttgctccaatcgcaaatattgatgtcatcttttgttttgcccttataaacttacttcaactgataagaaacctgcactacccgtaaaaggaaatttaaatttttttttttaaattttcaatctttttcatgtaactaatcttcttttaccaatgaacatacaaaactatcaattaacaccatataaattcccttcagaacttgaatccctatataaatggcttttcttatcaaatgacattttattaaaacgtttagcaattaataaaatacgatattatttaacaaaatcttcattacctcatagtttagaaatatctgcattacttattgaatcaaaattaaatgataataattcatcatcttctgatctctctacaagactccaatattcaatgtgtataatcaaatttgttaatggtttattggatccttatcaacaaagtatgtttaatataagtttacataaattagcaaatgaattaaatttacctgattattttgttgaatctcgtcatataagtactcatgaaaaattaccttcattagaaatgcttagaattataattgataaagcaattaattggcttaaaatgaattattgggaaattgcattaaatgaatataaatcattaaatttactcaatataaatactaatgattggattaatgcaattgaaaaatcaaataattattatcaacagaaacaacaaaaattgtacctatcaaacaatccacatctcctatcagatgatgatattaaacaagtacatgaagtactaaagaatattaaaaaatataggaaattacaaataaatggttcaaataacaatacttctcaattatccaatcaaataaacactcttaaatcaattataaataaaaaatctcatgattcaataatagatatcttaatatctaacaattatctaatattaaatggtgaaaaaagttataatcttaatatcaaacaaataaatggtattagaatgatttggagtaatttacttgaaaaattaccattattatttattgaaaaattatggattaaattatttaaattatcaacaattgaaactgattcctcacaattattacaattaaatgaatggattatttggatattaatcaatatttcatttataaatcattcaaatattaatcaaataattgatttattattgattaaaagtcaaattagtgttaaatgtttaccaattattaaagaaaaatattctactctactatcaacacaattaaataagaaattatcaaatattcaattaatgatggataaattttgggtatttgaagaaaccatcaatgataaaaagcataaaatagaggatgatctagtggaagaatctatgaaaaaacctaaccaactcaaaccattccttttcacaaaagcagtagatgataaagattggagaccaataccatttggttgtccaataccttattaaattaaaataatttctttaattttaaatctgtataaatttccattaatcctttatgtttataaatttcattactccatctacctctaattatccaattatcaataaatttattacttttcaaattaccaaattgacaataaattataccaattatcataaataaaattttatcccttgatgattgttcaagtttaattgttaattgataattattaaatgatattttacttaataaatctttactatctaaaatttcattaaattgattaataaatttataccttatttgccatgtattatattttcttggatcaattgaatcaagtttgttcattacattattatcatcattattattactatcattgaataataatacattgtataatcttaaattaagtaaattttcacctaattctaatattctaccttgttcaactttaactaattcaacatctttacgtattagattaatatcatctttgaaatatgaacaaataaataataaatcatcagagatttcaaattctttgggtataatattctttaaaatgttaatacgtgaagatgctttatgtcggaacttattcactctttcatatcgatataatgttggtaatggtgtattgattggatttaaatgaactattcttgggttcatatatttccatagttttaaattacttggtttcattgttcaaaaaggaagtacttaacttaacgatgacatgaaaatttcaacaaaaaaattatttttcatgttgatcaaactatacataccttttcgtaacttttttcttaataatggcaccaaagacaactactaagaaatccagtactaatagtaaggaaccgactacaaaggttaaacaaccaattattaaagaattaattataagaccattaaataatgaatatttgaaaaattttagaaattatccaaatattttaataacccaatcaacttgtgaaattttagaattaacaaaaggttcatttgttaaattatcaattggattaaaggaattagtatttttgattgatataatagatgataatggtgatgataatgataatattgatgatgatattgttttagttaatcaatattatttagacctttatggaatttcattaggtgaacgtgcaattataaataaatttaatggtaaattagaatatgcagatagtattaatgttgattatattggtgatataacggaaaatgatattgttgatattggagttgtttataatggattaaattgtgaaaaattttatatcaatggtattaatgaaattaatgaaaagatgaaagaattaagtatcgaagaaaaggaagatgatgaagtggatgaagaagagaaggcattgattgggtatttaattcatcctaagaatactgttatcaaactagataaagttgaatcattacctgaaatttttaaaaaatattcatttaatgatattggaggtcattctcaaacaatcaaacaaattaagaaaacaattttaattccattagagaagggtaaattatttaaatcatttggtattgaaccaccaagaggtattttattatatggtaattcaggtgttggtaaaacaatgataatgaaaagtatttcaagtgaatttcgtaaatgtcatataattaaaattgatggatcatcaattataagtaaatatttaggtgatagtgaagaaaaaattaggaaatcgtttaaggaagcaattaaatatcaaccatcaattatattaattgatgaaattgattcaattttaccaaatagattgaaaaaggatgatataagtgatatagataatagaattataaatacttttaattcaatgattgatgaattacatggtaatggtaaaattgttataattggtgcaactaatcaaattaataatattgatataagtttaagaagacctggtagatttgatatcgaaattgaaattaaaatacctgatattgaaggtagatttgatgttttacaaaagcaaataaataaaattgataaagatcaattaattgttagtaatgatgaaatttatgaaatttcaactaaaactcatggttatgttggatctgatttattatcattagttagagaaagtataatgaattcaattgatagatatataacccagggtgaatctaagatgggattgaagaaggaagattttgaaattgcaatgaaagaaattcgtccaagtgcaatgaaggaaattatgcttgaaatgcctgaagttaaatggtcagatattggaggtcaagaagaattaaaggttaaattacatgaaatggttgaattaccattaaaggaaattgaaagatttaagaaatttggtattaaagcaccaaaaggtttattattatatggaccacctggatgttccaagacaatgacagcaaaagcattagcaacagagagtggattaaatttctttgccattaaaggtcctgaaatatttgacaaatatgttggtgaaagtgaacgtaaaatacgtgatattttccaaaaggcaagaatttcatcaccatcaattatatttattgatgaaattgatgcaattgcagttgatagagaaggtggagaatcaacaaatgttagtaaacaagtattaaatacaatgttaaatgaattagatggtgttgaagaattaaatggtgttatattaattggtgcaactaatagaccattatcaatagatcctgcattattaagacctggtagattagatagacatgtttatgttggaccacctgatgaattagctagaaaggaaatattcattaagaatacaattaaatttggtatttcagatattgaattagctgaaattattgattatcttgttgcaaatactgatggttgtagtggtagtgaatgtgttttactttgtcaagaagctggattatcagctgttagtaaaggtaaggagagtgttactagggatgatttcgataaggcattggatgaattagtacgtaatattgatcaagagatgattgaatattacgaatcatttgccaataaatcaaagtcaaaataagttatatagatctgtatagagtgtaagtataaattttcaatattaactgcatgttcatttcttttaggtaaagtgtagtatataagttacaatggcattacaaggacataaaatcttgagtatacttgttttcagtggattgggagtttattcaggtgttaaattctttgaaccattaattgttgaacaattaaggaaagatggtaatttaagaaatgatatttatataccagaatttgataaaaatggtgataaaataattgatggagttgataagagtttacagtttgaaaagttacgtgaaagacttgaggagaagaagtagtctcttttgtcttatatatactctgtgtagctgtgtatatactctctatacgtacaggtggtaaactaccttaatttaatgacttgttacatgaaaatttggaaaaaaaatatttttcaactgaaaaaatttgaaattttttttcgatttattgtagcttttggtactttctttctacaagaatggctaaattaaagaagagaagtaaactctctcaacagagacatcgtggtaatgcaatagttaatccaaatgagaaagaaaatggcaaaaaatctgttaataaagatataaatcaatcaaataaagcaattacattattagatacattaaagaaaaattcaaatagttcaattaatgataaattaattacaattaataatatattagttcaatgtaataatgatgaaaatatgcgtaaagctttcttaaagaatgatttagttaagataatattaaatgatttacttattgaaaataataaatatgatgaaattttagttagttcattagatttacttaaacatttaattattgaagaaagttatgatttatcaatatatctttggagaaatggtatttgggaaattttaaaggagaatttcactaaggcattcaaatcattacaacatttaaatgattcaaatgttgatataatgagtaaagatttattacttaattatattaataatttaattgaaattttagataatttagtaatggaattaaatagtgaaacaattaaatcatcaataataccaaaattaaatgaagatgatattataatgaataatttatttgaaattttgaaaattgaaaatattaataaatttaatttatcaattataacaaatattttacaattaatttatgatttatcaagtattagtattgaatttttacaaaatattttattaaatgataataataatgtcagttttaccaaaattttcaataatttattatcaaatactgataaattaaatgaaaattcactttgtaaaatttatttaattggtattaatttacaaatatttgaaatcaaggataatttaaatgataatttaaatttaattattgatgaaattttcaatattactaatataattaataataatgaaactgcaatggaaggagaaaatttccaagttattgatatttcattagatttattaacaacaataattgaaatcaagggttcaatttatttacaagatgagacaaagaaagattcagtatttaatgaaaaatgtattgaacaaatattaccatttttgggtaaattatttgaaattaattacacaaataataagaaattgatttgtttaaataatttaattatttatttaaattctactaaattaatcaatgataaattaattgaagatttagaaatgttaaataataataaaattttaaatgaatttaataaattaattaatgaatcatttggtaaaattgatattgaaactataattgattatttaaattttgaattaaatttaattgaaattgaacctatgaaatttattcaaaatgaagaaataattacacaaattaataaattaattgaaatttctataaagaataaaattgatgaatttacagatattgaaattcaaattcaatttattacatcattattaatgtatttatcaattattgctaaaaatattaataatttagaaataactaaaaatattgttgaatttattattaaatataatttaattgaaccaattaatttttataataataaattaacaaatgataaattaaatatttctaaatatcataaaaaatatcattatttagttgaagaatcaattaatattgcaattaattcaatttttgaaatgtttgatgatgattattcatataatagaattatttatcatgatggtaaaatgaatgatttattaattaatattatgcaagattataagaaaatatataagaatattgataagaatgttaatttaaaattaaagagacaaactgaagaaacattaaataatctacaaagatttattgattacaaaaaaactgaataacttatataactttatataatactatactatactttatctttatattgttgagcttgtaatttaacttttttctgatattcctctggacttttactaaaagctttccaagcaggttcttgagctggtgaattaggatttggagtatctaataattcttgaatacctaataataatgatttaatattaattgcaggtctccaatcttgttcttcatttaatatactaagacaaattgtaccacttggataaacatttggatgataaaatgcaggtgggaatttaatttttgggggtttagcaggataatcttcaggaaatgaaattgttaatggataagttgcattttcccaaattgtaccttgtttaccaggtataccagcggtccaattatgtaaatcgagtgaaccatcagatttctttgttggttttgcataaaatccaaatggatgatctttacgccattgtttacgttcttgttgaattctctctgttcgcagatctcttgacattgtagttgttcaaagaagaagttgttgtagaaataatatatgaaatttatgttgaaaaaaaatttgtaattttcatgtagtcaataaatactgaattattatactgttttctctttaaacaatctacaatgtcaggagtagatgaatttgatgatttagatgattaccttgatgattttgaagaggagatattatcacaggaacctggtgctacaattatacctgaaaccattaatgaaatcgatgatattagtaaaattacacaatcaattggtatgaatgagaatttaagtaatgaaattagtgaatttattaaacaattagatccaaatggagatggtaatgaattaaatgatgttttaaacagtaaagagggtatgaatgggaatatgggatttcaagatactattaatgaaactattaatagactgaaaagttcatcaaaacaggtagaggatgaatcaagtgagaaatttactaaagatgaagaattattaactacattattaaatagtttagatattggaggagatattggatcaatggaaggtatggatgaattaaagggattgttgaatggtacaaatggtggtataaatgatgagaataatattgatgaaatgagtaatgttttaatgaatatgttgaataaattaacaagtaaagagatgatgtatgaaactataagtaatgcagttaataactatgaggagtattttaaaaaggataataaagaggtaaagggtgatgatatgaatagatttaaatctcaattaaaacatttaaagaatgttaaagaaacttttgataaggaagattataatgagaatgattcaagtataagagaatttattgatattgaaatggagaatttcaataagttattaccaccaccggagggtgtaatagaggataatctaagtggattaggtttagaaaattttaaatggaatgaacaagatattccaaatgaacttgaaggttgtgtacaacagtaagtaagtaagtaagtaaattatataataataataataataatctttgcaaagttaaacatcagacatccatggaaggtcattgggcggtcaccggagtatcaagatttgcagattgggttcgtgcaaatcttatacgatactgctaccgtggaaactgcgaatgtaatggtagctattcatcatatgtaaaactttttgcaaaaaaacagaaaagaaaaaataaaaagaaaacttttaaaactttaaaagtaaaccagcagaatattaatagtttggtatcagagatgcataattactggcaagtaaagtccttcaagaatatatctggtgatatattagagactaggatgatagaaaaatgataacctgcaacagaaaccatatctaacatcaggacaaatataccatgacatcatagtcgaataagaactggaaagaagtagcttatattcatcattcaaacagcaaactgctggtaccaagagaagaaagtagtaagagatacattataataaaaagtggaaaagctcttccttttataataagcgcagttggaaaatttttatttagagggtcctttcatttcagggtttttatacaatttgatggattatacagtaacaatatcaaagaatctgctgtctattggtctctgtgccttgatatatttaagtgtacgttcataataaccatattgtatttcacttctaccattctccttgaaactattactgattaattcaataagtccattcaaatatctaatactaacactttcaattccatgaataaaataataaacactttcatttaatatttcaataaataattcaattgcaatatttctatcactaatagaatctgcaattcttaatgatttttgtaaacattcaagtactctcttatcatctcttttaagagttattggtgtagtatcttcctctccttcatcactatctttattaatccaccataaatgtgatgatttataaattgctctacattgatcactcttcttcattaatctactaccatataatgtagcctttaatattagtttatcaaattcttcaatatcattaataatcatattatccattgacattaatgtattaataattataattaaactctcatattgaattttattctcaattattaattcttcataaataataaatgtttcaataaaatattcatatgttatattatttaaattaattgaatttgataaaatagcattatctaaattaagtctaattgcttcaattggttcagtttctttaataatttcaattaatttacttatcttattaaatattttattcatctctttaacatcaatgttttcttcttcattgctaatggatttcatatcagttaaaaatttcatatatttatatattaatgtaggtataatatcaatttgacattcttcattaccattacttaaataattttcaattttttctaataatttcctttgaatattaatatctttattataaacaaaattaataaatttactaattttcaaattattcttaaatttcatatccttttgactcttatcattatcatcaagacttaatttcgtagttttattattaatttctccaaataaatctaatttagtatcactaatatgttcatttgataagacaccatccttaaataatatagatttattaaaatacttgaaaactctatccaattcatcctcattttcaattataatattattttcaataattttattaataattatattactaatttcattcttaaccttcattgattgtaaattaaacaatttaaaataattttcatcattaattttcaaaaaatcttggaaatttttaaaatttttaattgatttaagtataattttaaatttatcagaatctttcttatccttacttaattcatatttttcaattgataattgataaataagattaattatttcataattatcatcattattgaaaattaatgataattttaaaatttcatttaatattaaacaataatcattaatactaaactccacattcatttcatttaattttttaataaatttaataaattcatttaaaaaggaattatcatttaaaatatcattatttcttaatttataatgaatcaatctatcaattaatgaattaattaataatgtaatattaacattcatattaaccattaataaagaattaaggaaaatttttaaacttgaaatttggaaattatcagggaatatttgaattataacatccaataaataattttgtgcaattgaatcattacaattaataatttgttttaaaatttcaggtaaaattaattcattatatttttttaaattaattgaatctaattgacttaaaataactaaatttgaaccaactaatatctttaattcattcctttcaataattctcttttctctttcacttgaatgaccttgaaattgtaatctaacccataatttattcatttcaataaaattattaataataaaattaattatattatcagttgttttatcatcatttgatgatgcactattaattaaataatttttagttctttgaattaaataataacgtaaaaataaacctctaattggattttgtacacctttacacatttctaacatatcattcataacttccttaattggtgcatctttattatttaaataaattgaaccaattgtaatcattaaatataatcttggtataatattaccagcatattgaattaattcatataaatcaattaaataattggtgttggttttattactattattaccattatctttaagatataaggtaagataatttaatccatcatagataagtatatataattcataatattgtttaggatttaaactacttgttcttaattcattaaggaaatttgatgcatgttttaaagcatccattaatttatgtttattatctaaacatttcctcatttgataaatttcacttttaataattgaaattgaattatcaagtagtttctgttgttcctgtggggttattgatgattgttttgacatagttattaaatgaaaacccaaaagaagtgtatgttgtatagttataagccttaataaatgagttgatagtactaatagcgaaatttactatgtgttgctttatagtgtgtatgacagggtttttgttgtggtggttgtgatggaatgggtgtttattaggggtagattggatgttatgatggttatgagtgtgtggatgtggtctttgaagggtggtaatggtgtcttgtggggttattgggagagaaatggtggttttatattggaaagtaatgtttttgtagagtatttgttttaatagctatgtgttaaagtacagattttaattgaatatttggtaatttatgtaaaatagccataattaaaggtaatagacattataagagtgttatagttataataggttgattatacactacatcatatacaaataaaagacagtaaaagaaaagataagataaaaatctggggataaccaatagcatattagataatccaaacggtttcaatgatggtatatctccatgggaccctcccttttcttaagttatctctttatcttatatcataacagctttaatgcaatcaagatctccttctttgtttgatatagacaaagaacttggaagtatacctaatttaaatcattctaataactatacaagttatgattataatgataataataatattaatgatagtaaatataaggataaagataaggaatttaattatttaaattattcaccaattagttcaataacttcatcaattgctaaatattggaattataatagtccaatagctagtaaaagttcttcttctcttcattattatagtcacacgactaaatatttgatattaaataggtatagattacttattaaaagatttatcattatattttcaattataatttcaattattttaatctttagtaaatattataattcaataactacagtatcttcaccaatcaaatgggattatttagattatgatccatttgattatcttaatgatgatgaaacttatcaaattataaaatcattagattttagtgccccattaccatatggtaaattaggttatgatccgagaattccagttgctaattatcttcaagaattaagtgaaactttaaaattaactggtacattatcatttaattatttatctaaatataaattctcttggaaagattggattaattttgataaaagacttttaccaagtaataaatttctgaataatcataatggtaatacattattaacatgtaatgaattttcaaatgaattaggattcccaaaattaaataataaatggaatttttggaattggaatatcgataatttaacaaattgtattgatattatcaatattgatgaattaattaatgttaattatccacattttaaaataattaaaccaattgatgatttctcactgaatgttgaaggtagaattgttcatggtgcattatatacacttcattcaatgccatcacctgaaagacttatatttgttgatggtgtaagtaatactaatataatattacccattaataatgatatttcccaagattccatagatgataatgtagatttacctcctataaatttattagttaatgatatattaaattctatcatcgataaagataccaatattaatccactctatgacacagctagaattattcataatattccaccaccattaacatatcaattatcaagggaagattttgaaaatcctaataatattaatgaaattgaagataaattaccaaattatcaaatcaaaaattcattaaataataaattatataaaaatatttttaatcaaattaaacttcaaaaatttgataaatatttccatgaaacaagagttaataatgaattaattggtggtagtcattatgattggagattttataatattaaagaaattgataatgaattcaaaagattaacaattttacagaaaatgattcaagcatggataaaattcactaataatgctaatattcaaacatggttaagtcatggtacattattaggtcattcatttaataataaaacattaccatgggattttgatcatgatgttcaaattagtagttcaagtatgtgggaaatggcaaataaatttaatcaatcattaattattgatattagtaaagataatttatttgattcaggtatgggtatatatttaattgatattaataataattttttcaatagaagtaatgaaaataagaaaaatacaattgatggtagatttattgatattcaaaatggaatgtatattgatatcacgcaactttcatttttaaatgttaatgaaattgaagaaaaattaactaaagttgttccaaaaatacataaagatttaaagaatgaattttatggattattaaaaggtaagaatttaaataatgatttaataattaaatctcaagatttattaagttgtaagaataatcatttttatcaatttgatgaagttaatgaaatgaaattagaaattttcgaaaatgtaccagtttacgtacaaaaagattatcataatattctcaatagagaattcccacgaaggaaacaaatatggaccattgaaggttacacatggagaagacaatacagagaatggattaagaacagtgattgtcttagaggaaggtttgattacaatggtgattcatgtaaaataagaggtaaagatagtgataaatcggcaaccttaccgtattgggaaagtgtggcccttgtctatggggggaaatacccaatgcggtaattggcgcattgataacatgtattaagtaactttaactataaataaggttaatattccccatagtttgtaatagaaatgaatagagtatagaatagatagaaatttatatagctaacaaaaaagtaaggaaaaatgccagttccagaacaatttacaggatatgcagtctatgatccatcagagagtacatggtcaagtgttaaaccatatagttatacaccaaaaccatttgaagataatgatattgatatattaattaaaacatgttcaatttgtggatctgatgcacatgcagctagaaatggttggaagaatcctgatgcacaattcccattagttgttggacatgaaattattggtgaagttgtacgtattggaccaaatgttaaagattttaaaattggtgatagagttggagttggagctcaaagtcaatcatgtatgaaatgtaaaatgtgtcttagtaataatgaaatttattgtccaaaattagttcatacatttggtggattttatcaaaataatgatggttcaacaactttctctcaaggtggttatgcaaattatgttagaattcatgaatattttgttttccatatacctgaaattttaacaaatgaggaagctgcaccatttttatgtgcaggtattacaacttattcaccaattattagaaatttaccatatgatttaattaaaagaggtgaaaagccaaaagttggtattgttggattaggtggtttaggtatgatggcaattcaatttgctaaagcattaggatgtgaaacatttgttttcagtagaaatgatagtaaaagggaagatgcaattaaattaggtgcagataaagttattattacaggtaatagtaaaacaggtaattggattgatgaaattgaagataataaatttattaaatttgaattagatttagttatttgtacagctaatagtgcagaaaattttgatttaaatacttaccttaaagttttaaaaattaatggtaaatgggtttcagttggattaccagaaactccatttactgtttcaccaagaagttttatgtcaaatgcatgttttatgggtgcatcacatttaggtagtcatgttgaaatgattgaaatgtttaaattagcagttgaaaaaggtattaaaccatgggttgaaattttaccaatgtcaattgataattgtaaattaggtttagagaaatgtcattataataaatgtaaatatagagttgcattaactgatattgataaagcatttaaataaagatagataaagagagtttatttttataagagtatatagtatagtatatatgatatgctgataaaagaaaatgaaaatgtaaaagtaaaaagatagtaaaaaagactaaaggagagtataagtagtattatgaagggtattgtaatgatgataatataacaatcaatgttcaataatatcatctaaaatataaacatttttctctaaatcaacagataaagcagcaggtaaatttgaatctttccttgtctttcttggaatttcaatattagcataaggagagctattatttagtgaattataatttgatgatgatgatgatgaattggagaaataatttttaaatgaatgtaataaatgataaaattttgtactaatatttaattttttatcaatgaaaaccactaagaaatattctgataaaataattgcaatacctaataaagtacaaaaaataacacttaaaattatatgatgactcattaataataaaacagctgcatcatctttatgccaagaagaaccttttgaaatttgaaagaatgaattttcattatttttataatcatttggcattaaaattctaacaactgcacttgctggattaccccatctaatatattgtttccaaacaactgaaaggaataggggaccagttgaaaacataattgtaatataggggactaaccaattaatttgataagccttaagcatattagttgccttaatgaaaaatggatgatttggaattgaacccattacatcatttgaaatacctgttggtaaagttttcctaacgaaagcaggaacattaagtaaaggatctaaatttctattacaaccatcatctaaatcgatataaataccaccataataagaaagtataaaatatcttataacatcagctctttgaattggataaggataattatcaaaagtatttaaaaaccaaggatattgttgtttaataaaatttctagccatttcatcagtccaaagtatatattgataatcaggatttaaaatttgacaatttttttgaccatttttccaatgatttgggatattattatctttataagtttgatgaatgattttaggtattaaaggagtttgagaattgataaaatctttattatttaaatcattatcagttaaagcaaattgatttgagttatcataaaggagggttattaaatcaaataagaaccagataagaaaaaccgctaagattagatgagcgtaaaagaggaacttagcatgtccatttactctcatggtgtagttatagaaagatacaaaagaagaagaagaagaagaaagacacaaaagaaagaaaagaaacaaaggaggctgatatatgataatggaaatgaagcaacactctaataataataataataacagtatacggtacagtataattattaaaacacgcttttttattttcttccactttttatttttttcatttggaaaatttttttattttattttattttatgtcttttattttcttttattttcttttcttttatttcttttttagtttggtatagtatatcaccaatgtcagtgtggaaggtagaaccagttgatactattgcttctatagatttatctcttttgtctaataataacaacaataacagtagtcataatagtagtagtacttctatatctaactctaatactaaatggataccttatactgatgcagttataaaaatatcatcttcttcatcatcttcttcttcaccatctaataagaaaccttcatcttcaaacaatagaaaacaaaagaagaaaccatcaaagaagaaatctgttaatcataagataatagaaaaagataataataataaagataataataaagaaaaagacattaaagatagtaataaagatattaccatcacaaaagaatcaaaacctgtacataacaataataatagaaataaccatactactaataataatgaaaaaaaacctaatagaagatacaataatagatcaaacaaccatagaaataaccatacacataccaacaacaataacaatataagattatttgcaattaactcaattgcatttcaaattgattattattttacaatatctaatttacttaaagatatttacctacgtaaacatatgaacagtgaaggatgggttgaattatcatttatcagtcaattccaaagaattcaacacttctcacaaggtgatgaatcactcatcaaggaggcattacctcattgtaagaacattgaatacaacagtgatgataacactttaagaactcttcataatccacttaattggattttataatagtattacgtaagatgtatagattttttaattgttattataatattctcaatctcagtggcaaatacaattttactagctgagccaatcactctcttatactggcaatggctgatttctcttctgtactgcttaataacaccaatgacagtgtcttaattaaagattcaaataatcatatactcaaagtttcagtaattgacccaattcttgaaaaaaatgattcaaatccttatgtaaattatcatttacaaattatttcaaatttacctaaattaactaataaagacaataatacaacaattgaatatacaattaatcatagatattctgatttcgatatattaagaaaatgtcttaaattcgattatccaactttacttatacctccattaccaacaaagcaaagattagaatatattaaaggtggtagatttacaaatgaatttataacaaagagatgtaattcacttaatttatttattaagagaatactaaatcacccgatattgtcaaattgtgaaatttttcttatattcctcgggaaggataataatatttgggataattataaaaaaaatattaatataggtaacaattcaaataataataatgatttacaaattgaaaatgtaactgattatttaatgaattcctttaaaaaggtaaatacagaaactaaatttaataaaaattttaaagaaattgaatttaatagatcaaaattaaatgaaaatttaattaaattcgataaaattttcaataaagttatatcaaagcaagatttattatcaaaagagatgaaccttttcagtgatgaatttaataaattaagtgttttacttaataatgattataatggaaaatttagaaatttaaatcaaattgataataatacaaaattaataattgaaaaatttaaattattttcaaataatttatcattatcaagtaatcaatatattgaaataaataaatttttagaatttaattatttaaataatttaaaagatttagaacattatattataagttttaataatttatcaaaattaaaagattataaaattttagattatgaaatgttaaataattatttagagaaaacaattaatgaaagggataatttaaaaaatggcggttcattaatttcatcttcaactgaaagtactttatcatttataactaaaaaattagaatttttcaaaaataatgaaaataatgataataataattctaattcaaatgaaacaactttaattaatgatagaattgataaattaaatgaaagaattgaattattaaatagtgaaattttaaaatcaaaatcagtttatgaaaaatttgaaaatgatttacttaatgaatggaaaaatttccaaaatattaaagatttagaaataaatgattcattaaatgatttaagtaaggaatattgtaaattatatgaaaattcattaaaaatttgggaaaattttaataataataataataataataatgaaattgataacaatgataaaatacgatttaataattcattagatgataattctaaaattgataagtattttaataataatgaaatggaacaaaattcattagaaattgaaaatttactgaaaaatcaaaatcttgatgactagttcatatctttaccttcttattaccatcatcacataatacctctccattatcattaaattctaaaaaataattattatcaaatatctttacattttcaatcccccaaatacttataaattcatctcttgaaatatacttttcataatttaaaattggaaaactatcaatattcaatactctcttctttttattaattgaatttggattatgtttattttcaccaatataaaatttccttaaaagtgaaattgcatccttatgaccaacacctggtataattttataatttgatttataattaattttaaagacactaccattaccaccaaatctttcatttgggcaaccgaaaacaactttacctatacctacttgatctaacattgatgcacacataatacatggttcaacagttacgaataatgttgaattttgccaaattttcaaatgattttcttcattctctaataaataattataaatttgaaattctgcatgtaatgtaccattaattaatttattcgtcatattatgtgctctataccatattttaccactatcattatcaactaaaattgcactaactggtacttcattattaattaatgcaatattaccaaattctaaagcttcacgcataaatttccaataatttaattccataatttatttatttatctttgtttactttcttctcttctttttaaaacaatgaatgaaatacgtaatgaaattaaaatacttaatgatgaaataaataattattctaaatttgataatttaataaatacaatttataatgaatataaagatgaagatgaagatgaaaatataccaaataatattgaaaatttaatttttattgaaaatataaatagatttaatggtattacagttttccccattgataataatattaatcaattaggtattagattcgatgttttcaatcaatcatacaagaaattcaatccaactcattatattatacttgaatatacttcaataaaggatgataatcatcattgggaaataattcatcatacattaccttcatctattgacattatgcattatcaattactttatttacataatgttaatcctaatgataataacacaccagacgcatcgtctatacctcaatttaacttgataaacaagtttgcaatgagaatactacaatgtctttactctaatctatagtttaatgtttcttcttagtatacagtgtaatatataatataatttaaatatcctttgcttcatcatcatcatcaccaccctgcttaacttcgtcatccttaacttcctcacctccctcttccttctcctcctctttctctttttcttcatcttcttttaaaatttcattcattttattctcaactaattctgcacatttagtaacccatgaaccttcttcattataaaatcttgcatttgcaaacattaattttaataattcaataacttcttcaaaacttttaatttttttaccttcaatatttttacgaatttgtccaatactaacaggatttttgataactttaaaataatctgcaaaaaatttccttgatggtaatttaatgaaaacattggaaacatcattaccatcctcatcataaacattttccaatttatttaacatttcattactcttaattatccattcaggtgttggtggtttaactttctttggtgcactaggtcttggtgtattatttcttggtgtactaccccttgacattaattgtctcttacgtgcaggtaattcatcctcataaacttcttcatcactatcatcatcatccataactttatcaatatcatcatcaatatcatcatcatcttcttcatcatcaactatacccctagttcgttttaattttgcaattcttttacgtttacgttcaattgctgcttcaactgaatcattatcattatccattgcttgtaaccattgttcctcagttaatccatcatcatagaaaactttcttcttagttcttaatccactaattgaatcatctttaatattttgtaaatgatcattcatatcctctttgaaaacttgtggaacttcatcatcattcattaatcttgccttaataccatcatttttatcattaataactctttcctcatcaagttcttcaaaaacttcaatttcagtctcatttctagctaaaatttcattaatttcattatcatcataattatcaacttcttcatcatcatttttactattctctgcttcaattaattgttttaaatatgcttcttgttcctctgcacttgatttattatcaaatttacctgcttgaataactttaccatcaatatctaatttttgatgagctctttcaagaataacttcttcaaatgattcacttgtaattaatcttaaaattctaacttcattcttttgtccaattctatgagctctatcttgtgcttgtaaatcttgatgtgggttccaatcagtatcaaaaataataacagtatcagcagtttgtaaatttaatcctaaaccaccagctctagttgataataaaaagcaaaaatattcactatttggttcattaaaatcttttaacattaattgtctatcatctgcctttgttgaaccatctaatctcatatattttaaatttttaaatctaagataatcttccattatatccataacttgtgtcatttggaaaaaaattaatactctatgaccagttttctttaattttggtaaaattctatctaaaacttcaaatttacctgaacatctccaaattaaattagttgtcagtctttcaggattaacaatattttcaacttcttcgaaaacaaatggatgattacatgcttttcttaattgcattattttattatttaaaccttttaaacctgatttagttgcaccaagactaccttcaccaataaataatgcattatgatttaataattgtttataaattcttaattgtaatgcagaaaatttacatttaataactttttcaactttatcaggtaaatcttttgcaacatcttttttcaatctacgtaataaaaatggtcttaaaactttatgtaatcttctaataattaataaactttcttcttcacttaattctaatttttcttgatgaccagtatttgcaaatggtgtattaaaccattcatcaaaacttttaacagaattgaaaacttttggtaaaataaaatttaataatgcccataattcaggtaaactattttgtaatggagtaccagttaaaattaatctattatttgtatgataataatttgttaaagttataaataatttagaatttgcatttttcaatctatgaccttcatcaattaacatatgagcccatttaaatttacttaataatggtctatccttaataacatattcataagttgttaataaaacattaaaatctcccattctaatttgatgttgtaattctttacgttgattttgtgtacctttataaacaacagttttcaaacttggtgcccattgttcaaattctaatgtccaatttgtaattgttgataatggtacaataattaaaaatttacccatttcatgtttattttcaattaaataagtaattaaagcaattgattgaattgttttacctaaacccatttcatctgctaaaataccattaagatgattattatataatgaaaccatccattctaaacctttaatttgatattcctttaatgtaccaccaacaagtattgatggttgtttagtgacagtttccttaattttatgtgcaacatcataataatcaactttctttttcatttcttcatcaacttcatctgctccttcattttcctcattttcttcaacaatttgtttattaacaattgatttatgagttttagaatcattctgttgatctttaacagcatttgctaaagaatcaaggaaagaattagtttgttttaataaatgagtaattcttttatcctttgtttgatctaataaacgaatataagcttcttcatcatttgccttaagagcttgtaatctttgctttgcatttctttcaagttttttagattgttccctttcagtttgttgatgaaattgatgtatacttctagctaattgaattttatgtaattgtttattactaattaaattttgtttttcaattgataaatttgttaaatttttaactttattttcatgaattaattgaatttgacgttgtttttcaatttgttgttgttgtaataatttttcagctaatttagcagtttgtaaaattttttgttttggatgaacacaataagttcttttccaagttttaaaaattgaataattatttaaattttcatcattataaatcgtatttgttgcaactttaattaataaatgatttctaatttgcttttgtaatggtaataattttaaagattttaattcaactaatgcatcaatttttaaactatcaatattatcaataatttggtcatttgagaaacgtaaatcattttcaaatttattaaaatctattgaacctaaatttgaaggtaattgttgtaaatttgcaattctttcctcaatttgtaatttaattgaatcttcaagttcatttaaaccaacagaattaaattcttttgaaactgttggtcttgaaggtttaataccaaacatttctgcctttgcattataatcatctaatggtaaagttattttattatcattatcattggtaacattagttgctgatacttcttcttcattataattaggattaacatattctaaatccaattctattggtaaatcaacatcatgagataataaattaaaacctaataattgagattttaaaagatctaaatcaacattttcattgttttcattccaacttttattaattttttctctattatttttatcctttaaagatttttcattaatttcttttaaagaattaagtaaatcattttgaattttaacatctacaccctgttgattataagatatgaatttatctacaatatccatatcgttggttgttgtgtagtatacaaatcaaattactaaattagaaaaagaaaggagtgtttgggtcaatttggtgagccgttgataattgacatttttgagaatatttgccacttaaatgagcgcgcatattttgaataagtgttaacaaagttaattgttgtctagcacttattattgtcatattaaatgcataagtcattgctcctgcaaattgattggacatttgtgcatctgctgaagtttgatcatctctacaacctgaaattgaaattacattagctggtgaacttttcatttgtttaattcgttccctctttgatgtacttttataatttgtagctgtattaaataatgatttagctccttcaattaattgtcctgtattccttgttgtatatcccataaataattccattgtcgcaggtgcagctgtctttaatactgaatattcctttaatccaccatctgttgctttatacataaatggtaaatccagtactgaacctgaatgacaacaatcaaataatgcagttaaataactatttggtggtaatggtttaaccattatatcatgtaaaatatcatcaattattgaacctgcaatttggaaatcaactggataaatacattcatcaaatccatcatcttcatcaccatctaaatctttaactttacctccatgacctgaataatggaaaaataatgaatcaccaggttgaacaccttgaactaaccattgcattgctcttaaaatattattcctagttggtgcatccataccacccatatcatctcttaaaacaaccatatcattttgtgaatatccatttgctaaaagtaaatttgcaattgtacatgcatcattaatacatcctctaagttgattttgactaccagtataattaatacctattataagtgctttcttcattatcctatgtgcagtttaagtgatatgtaacacccattaatcaatatacattctagcatgaaacaagcctcttaaacagttaataccttctgtacgtcgcgtctaatgaatatatcctctattgggtcaatgtctattggtaatgtctattggtaatgtctattggtaatgtctatacttgaaggacgcaattcaatggagtgttgttagtattatacattataaagagtagttatttatacaaggtagttggttattattaaagatggtatgaaaatataataatttgaaaataaattgtactttcgatatatactaatatcatattcctttgttattgtcgtattctaacttgtaaccatacaatatctttataactaacatgatttctacaaactggacataatccattacgtgcatttgtactattagttgatccattattaccatttgatgatgctaatgctctatataaacatttactgcagaaaatgtgtccacaaggtgtagcgactgcattagttggtgaacttaaacatatgggacaggataccattgaattgaattgagttagttagttagtcagttatactattatattattatataatatactatttagataattgattataaaatacgagagattaagaaggcaataataattaaaactaaagcaataatgtaaaaaagagtatcatttgaagaagttgatgttttacctgggacgctcgttggtggtgcaattggagttgtctttgtaattgttggtttaatttcattttcttcaataatttccttattatgtagttgttgttgttgttgttgttgttgttgttgaggaggaatttctttattatcttgtacaggtattgatttctctactggtaaagtttctctttgaatattattttcaattacaggttgttcaatttcttcttctctcttttcagcaattgtattcattgtaccaaaatcatagacaactttaactttgatatcacttgaaacaccaccattttgtgcctctaattcactccatttacttgaaacatctttatgatctaaaatttcattacatggtactgaaacaaataaaaatttatctttacattttgaacctaattgaggttcatctgataatccttggaaaataattgtaatttgaatttgttcatttgattttaaaactcctgaattgggacgcacacaataagattttggtgcagttgtctttaccttaaatgcaattgcagaatttgaatcattctttaaatcaacaacttgtgtttgttgtgtatttttaaatggtgctgtaatataatatttgaaagtgagaattgttagtatgaatgttttgtagatttaaattgatttaaattgatttgtaataaagtcaattattatatgatgatatgcatgaaatcatcaaaacataacatataataaagacaatgacaattaaaatagtgtataatacatacctttaagttcaatgactttagtagataccaacatgactgattaatggagtatactatgtgatataacagataaaataaacaaaaatcctaataaaacagccaaacacttcctacacagtgttaaaacctcagttgtccacaccaacaacccaatttcaattttcctctctttcaaatttcaaattttcaaattttcctcgcaattttctttccctagagttccgatccctatattataattataattacatgtatacggtacacgtactttcactgatgtatattctttgataattacctatcctgcattcatctagtcaactagaaaatgccataccctattacccccactacttctaataatggtgatataccaaatccgggaatacagagatctcctgatagatttccagataatttacagagtttacagagacctaatagattaagaacagattcttgtatgagtattaatacaacttataataataatcccatttcacaaccaatgttccttaggaatagacaaaattctaatgtttccctttcatcttctatttattctgaaatgccacaacctcatttagataattataatttcactcaacaattcgatgatgaattatatagttattatattgcatatgcacatcaacctaatattacaccatttgattctcgtttcccaccttcaggtgttttatcattagtttcaaaacttttctatgaaaataaattattaccaccatcatcatcatctactccattaattcaaattgatcacagattagatgtttcaaatgatttacttaatgaatcaaatattcatcttttattaacaattttaagattaagattaattcatttatgtaatgttaattcaaataatggtaatggtaatggtaatgattcttatatgatggatcaattaccaatttcaagaactaattcaattgtatcggcaatttcagttaatgatagagttatgcctaattttaattcaattaatatgatgtcaactgattcaattcaattaccaatttacaatatgtcaagtaataataataattatagtagttataataataataatatgaacactgaagaaatgataaataatcaaataaatagtattcatttaaatcaaactaatcctgaatttgatgaaaatgatgatgataatttacaacatttacaacctccaccaccagttgcattacaaactgcaacaaagagagaacgtccatcacttaatcttaatatgccaacatttttacagaaaagatcatcatttacatcaaatcaacaatcaaattcaacaccatctgctagaactccaagaggtgttagatcaagttcaattacaaaggcaggtcctacatattttaatcttacaccaactacaaattcaaatccaaatactttccataatccaacattaaatcatataacatctccattagatatgatgtctccatttgaacaatcattcccatctccattagcattttctgcaccacctcaattaccagttacatctaccaatataaccactcctactacaaacaccactcctcccccatcatcagcagcagcagattcagaactatacaatgcaacagctaatcgtaaaagagacagtttaaggtttaaacgtggacttaactaagtatatttcggctaaccttcctaatagggacacttcatgggagaggaccactcatttccgttattctgacatgtttctcattttttcttatataaattctgtatcattagatgttttcctttttatagttaataattgttttcttttgaattgtagtctttattaactcgattaattaacaattaattagcaattaacaattacaatgacatctccattatctttagacgcttggaatcaattacaatcactctatgaatcaaagggtaaatctttttcaactaaggaagcattcaaatcagatcctaaaagattttcaaaattctctcatgaattcactaatttcgataattctaaaatcttatttgattactctaaaaatttaattgatgaagaaattttatcttcattaattcaattagctaaagaggcaaatgttgaaaaattaagaaatgaaatgtttaatggtgatcatattaatacaactgaagatagagctgtttatcatgttgctttaagaaatagatcaatgaaagaaatgaaagttgatggtgttaatgtcgctaatgaagttaatgatgttttacaacatatgaaagaattctctgattctgttagagatggttcttggaaaggttatacaggtgaaaaaattcttaatgttgttaatattggtattggtggttctgatttaggtcctgttatggttactgaagctttaaaacattatgctcatgaatcaattaaagttcattttgtttcaaatgttgatggtactcatattgttgaaactttaaaaaattgtaaacctgaatcaactcttttccttattgcttcaaaaacttttacaactgctgaaacttgtgctaatgcagttactgctaaaaattggtttttaaatcatgttaaggatgaatctcatattgctaaacattttgttgctttaagtactaatgcagaagaagttgctaaatttggtattgatactaaaaatatgtttggttttgaaaattgggttggtggtagatattcagtttggtcagcaattggtttatcaatttgtatctatattggttttgaaaattttgataaattcttaaaaggtgcagaagcaattgataatcatttccttaatacaccaattgaagaaaatatcccattcttaggtggtcttttaactatttggtataataatttccataaagctcaaactaaattagttgcaccatttgatcaatatatgcatagattccctgcttatttacaacaattatcaatggaatcaaatggtaaatcagttacaaaagattctaaatttgttaattatgaaactggtgttgttcttttcggtgaaccaacaactaatgcacaacattcatttttccaattagttcatcaaggtactaaattaattccaactgattttatacttgcagctcaatctcataatcctgttgaaaataataaacatcaacttatgttagcttcaaattattttgctcaagctgaatctttaatgttaggtaaaacaaaggaacaagttgaaagtgaaggtactgaatcttcattagtaccacataaaatgttcccaggtaatagaccaacaacttcaattttagctcaaaaaattactcctgcaactttaggttcattaattgcttattatgaacatgttacatttgttgaaggtgcaatttggggtattaattcatttgatcaatggggtgttgaattaggtaaagttttagcaaaagttatcttaaaggaattacaaactgaaggtgatgttaaaactcatgatgcaagtactcaaggtttaattaatcaattcaaagcttgggcttaaatgactgaatgtgaacttttataaatttactatttaatattaacttaattattaacgaatctattaatctatttatatcccaactcctggtacttttatgggcaacataccggaacatctcccacgaaaaacaaataaactcggccgtctataacccaccggcaaaaactatagcaaccgactgaatttctgaatttttcaccagttcatcaattaaatctatttcaagcctcctaatcagtctacaccacacatgtattatataatatacgtggttagggaccgtatgttgtttatatttttattaagcaaataacttgtttctgtgttcatattagacaaacaagtctggtttctcgtttaataatatgcgtttgactaaaaagtttaacagtttattagtctattcatttctgacaattgctattttattggttattagaaatgtgtcaaagttacgggatcgtcctaaagaaataattttgaaagataatttgattaatggaaaaggcccccaaacaaaagttaatgaaaaaatattaccaacaggagtgaagaataacgacaaagaaatcgacagggaagaagttgatattgaaaaattcattgataaaatatacaatgagaatccaaaagattttggtaatcaaattgccaaattatcagatgatgaaattacagatgcattaaagataataaaacaaaaacaagacattttaaatgaatcagcaaaaaataaaaaaagtgtaagttccagtggaactgataaagttgaaggtacattattagacaataaagatagaattaggaaagaaacgagtccagataataagccttgggcacaatatgaattagaaagaataataaatactccagaaattaaatataagagacaaaatgcaacattatttacactgtgtcgaaatagtgaaatgtattcaatgttgaaaacaattcatcaagtggaatcaagatttaataataaatttggatatgattgggtctttctcaatgatgaaccatttgatgaagagtttataactttaacaagtaatatgattagtggtagagttagatatggattaataccaagggaacattggagttatcctgattatattgatgaagataaggcaagagaagttagagagagtagaaaatgggcaagaataacttatggtacaagtgaaagttatagacatatgtgtagatttaattcaatgtttttctataaacatccaattatgagagaatatgaatattattggagaattgaacctgatgttaacttccattgtgatattatggaagatccatttaaatttttaaaagatgaaggtattaaatatggtttcacaatttcaatgagagaattacataatacaattgaaacattatgggaaacaagtaagaaatattttaattcattaaataaagattattttagtaaagaagttgataatttaagtgaatttataagtgatgataatggagaaacttataatttatgtcattattggtcaaattttgaaattgcatcattaagtatttataataatgaaatttatgaaggatatgttaattatttagataaagcaggtgggttcttttatgaaagatggggggatgcaccaattcattcaataatctttagtttaatgttgaggaaagatgaaattcatttgtttaaagatatcagttatcaacatacagtcggtacgatatgtcctttagatgataaaattcgtatgaaagcaaaatgtacatgtaattcaattactgataattgggtaatgaatagtaaagatagttgtaatataaaatttcatgatgttggaggagctgaaaaggatccattttatcaagcttatttacaaaaaatagaaattgataaagaaaatgagttaaaatcaaatagtgaacaaagtgttttgagaaaagaaagagctagacgaatagctgaggcaagaagacggaaagcaaatgatcttatggcggaacgtgctaagaaacaacaagaaggttcttattgaaccagtatatattattttataataacattagattgtataatagatagaaaaaagataaagaaagaaaaacattgaaaaccgttgaattttggtgacatgaattttatttcataccgcaagttttgtaaatcatgttgatgaatctacgttatttttatctggtcatgatctgtcatattaaataaaccaaatgtcatcatctgaagatgagaaggagttaaatatcaacatattacgaaacaatatcatacgaaggtcttcttctaaaaaggaatcaccaataaaacttataataaataccagtaccaataatagtgatgatgatggtgataatgaaaataccagtaaacctgaactattcctcaattgcgatcaatcttcctcaaaagtaacaggatggaagaaacttttatggcttaaacaaccatatcctgataattacacagatgctagtttcctttcacaattaaagagaaattcaacagttgttcaatattcatatacaaaacttgtttatgatttctcattagttgttttacatttatcattaattatgtcagttattgttgttttttatggaatttatcaacttaattggaatccaattaaaccattaattttaagtacaacaatgacaataattggatttatttattatacagttacacttaatataaggaggaataaagaattaattgaattacaacaatttaaaattaaacaattatataatataccaacaactccaaatttattattagtaccaaatttaaaaattaatgaatcagatattttaaatatggaagaatatttaactgaaccatcaccaccaaatttttatgaaacttgtaaatcatcattattaattatactttatatattaacattaacaccagttcttaaatcattaacaaattcaacatcatctgattcaatttgggcattaagtggttggttatcaattttaaatattttatttaatgattatcaaattgagttccctaaattatcaattaaggaaaaacgattacattggcaaaaattattaattaataattatcaaaataaattatttcaaacaccatttaattcaagatctccatcacctgttccatctagaataaattcatcaattaatttaaatacttctaattcaaacaatcaacaagaattaaaaccaatttttcataataatattaaattaaatgaattatttaatcaacaaattaaaaattctaatatttctaaaaatattgcagtttcaaatgcaattgtacttgcatctagattaaattctaatatttcagcattttcatttatattatttgcaattcaattatgtggattattccctacatttaataattttacacgtcgttgtaaattaaatgaatttcatcttttacaaatgattttaataattgtaacagttgatacattagtttgtaaattatttggttatggatggtttataacttggatttcattacattttatgataattataattggaccttggtattttctaacattacaaaaatataaaaatgaattacaaggtccttgggatattgcaaaacctgttgttaattctaaattttgagattagtttttaattaatatagttaattatacaatttttttttattatttatacagtaattatttcataaatggaccagctgcaagacataaatttctacgtgtaaattcaaccttataaatcggtgtcttttttgtaaaataaactcccatatgatcatctgaaccaaatttaacgttatttttacccttattattatcaccctttacatgattattgttactattactatttgtgttaaaagtttcaggacgtgaacctgaaattatatcaattgtatctcttttagcatcccaaacacgtacactattatctgcacctccactaactaatacttcaccatcacgactccaagctaatgaatgaataccaccagatccatgaccacgcattgttttcaattttctacctgatgcaatatcccaaacatgaataactgaacctgtaaatgataaattaccttcattatatgatgaaccatttttctttgataaattattttctttatctttactattcttatctttaccattcttatccttagtattcttatctgattcatcattagtatcattactatttttatcattactaccaccacttggtgtaaaacctccaccaatactattagtccaatcacttacaccaaaagaattatttaaataattttcttcattaacagaacaagttgctaaccaacgaccatcaggtgaacaagcgatatcattaattggtgatgtatgaccaacaaataatctaacactttcaccctttgcaatatcccacattctaatagttttatcacttgaacctgtaaataaataagtaccatttggatgaaatttaacaatatcaacatcatttaaatgacctgcaaatatacgtaatggataaatatgatcacaagaccataatcttgcagtttgatcatgtgaagcagttgcaaaataatgacctaatggagaaaattcaacatcccaaacaggtgaatttgaaccacctgcaccacctgcacctccatgacctttatatgaaactaatgatgtataagtatccattgaccataatctaacagttgaatctgctgatgatgaaagtaaatatttaccatcaggtgaaaatgacataccataaacaggacctgaatgaccaattaatcttctagttgaattattttctaaattaacattattataattatgaggatcatttttcaaaactgattttaatggtgaaccatcaatactccataatttaataaaagaatcttgaaatccacctgcaatcattgtataatcaggatgatattctaatgagttaagatcattattagtattttgaaatgtatacatacaaacagaaggtaatgaaggttgtgaaatataaactttcctattatttggatcagcattaagatgagaatatgaagctgatgataattttatctttgatcttgaatcatgaatttcttgaattgcacgttttaaatcataaactgtcttttgaggtaatggcaaagtattctttgctggggaattatcattttttggatcgattttaaaattttcattatattcttccataagtgttttcttaggtgtatcatcattttcattatttgtattattattgttattattattattatcatttttagcattttcatctctatgttttaattcagcttctaattcttttgtaaattcttcatcttgtggataaggacctaattttaaaggtttttctttatttgatatgaaagaagattttgatgatttaaattgattatcagttgtttcatctttatcattacttaaattgattaattcataaatttcaggtataccttctaaattatttaaacttagagaattttcatcatttgaagaagttgtaacttcaatttgtgtattaatttcaaaattattatttaaaaatctaattaatataccaccaccaattgcttgattttcattaataaaacctaaaattaaatttaatgaagtatttgaaatatttaatttatatttatttgaaagaaaaattttagcaaatttattttcatttaaatgactttgtaaattaatttttaataaatttttaaattcttcattatgattgaaaatatgatcagatttaaattttaaaaggaaatcatgagcaattttagtttcatttctttcaattaatgccaaataagaatatatgaagaaaggataaaggaattttttcaattcatatttatacatttccaaagaattatcacaccaagttctataaagtaaataagatctagcataaatatttggatcttcatcgaattgtctctgtaatgaaatattttgattatttttaaatttttgtaattgaaattgtaaatttgaacgttcagatgttgcagttgaaggtttattataatttgtatttgaatttgttaaatttatattttgagaacctggtattttagttgattcaattcttaaagttgattcagtttgatgataacctttacgtgtaagatattcttggactaatctatttaaattgaatggtaattcctgtggttgttgttgttgttgatgttgactttgatgttgtgattgagcatttgatgaatgttgttgtgtattagatgatgatgattgttgttgttgttgttgttgttgtgaaggaattgcagaagggttatttgatgataatgaaggattgggattcgatgacattaagctgatacgatgattagttgaccaataaagagatcaagatagtaaagaagtagtcctaaggcattagataatagttaaaaattggtaaaaaggtgaaaaaggtgaaaattcgaggttgtaaatgaaaaagctgtttcttcactataaaaggaatctatttcgccgttgcgatgagatttagtattgtaatcaatgtttatctcttcttctttttgtattttattattatattatatatcatttctttaagtaaacaatgtcttcaagatatgatgcattagttactattgctacattgatgtgtattacatcatgtacattttttttaggtatattatatagtaattggccatatacacatgcaattttatgggttaatgattatcaaaataatgaaatttcaactaaattattattaaatcattatttacattggttggaagtaccaaaatttataccatatacaatgtatggagttgtttgttttggatttttaggatttacaattaaaatttttagaccagcagttgatattcaatattttgaatatggatcatttattgtttatatattagcagtttgttgttatgtatcaaatattagatttggtatttattcagcacaggcaggtgaatggggggatgttgatgaatatactggattatcagttattgcagcaagtgaagttataaatgtatttttattattaggtattgtagttattcaaagtggattattttatgcaaaatatgaagatgatagagttaaaactacatttttaatgaatgaactaaagagtaaattagcacaagcagagtctaatataatcaatagagaagatagtaataaaaccaaatctaagggtaaatccagtggtgtatcaaagaaagttcaataagtaatagataagataagatttatacggcaataaatacgatcttctattatattataatacgcgcttattgcttattgagtatttctattttatatttctatttctatttatatttctcttttacttacttactcttctttcttttatgtattctgtatataacaatgaacagtactaataataataactgtatcaatctatctatacccgtagatagtgcatataatatcaattgtacttatagacctaaacctactaatttaagtacaatcccattacctaataccacaataatacaactaaataacacattacagagtgaaaataaaaagaaggaggaaattcaaaggctcatcgacgccaccgaaattatttattcaattgatgagccttcaattaggaaaaataaattcatctcctggtcgatgggactctagcgtcggtgggactgtttcttatattatatcttgttctgactgactgactaactgactgactgatttcaattcttattctaacttcgaaatttcatgcatttaattttttaaaccacattttttaaccttcttttgcagatctctttaattataatcatccctctctttattcctttatcttctttctttaagacacaaccatctcattatgtcttactccctttatcttaataaagattcaactcctattgcattagctgataatcttaaaattgcaatttcatctcatgaattaaataataaattatacaattcaattataactgatttattcgataatagttcaattaataattctaaaaatgcaatcttacttgattcaaaacatcctaatttccatttatttcattcaaatacaattgttaaatatttaaaagctttatcaacttcaacttttgataaagatttagtttatttaaatattgaatcaaaattatactgttatttaaaaaataataaaattaatgaatctgaaattaatgaattaatttcttcatttaatgatattaatactaaagatattgctcaaataattactttttcatcaatttatgctcttattcattcaaatgatgatttattatcaaaatttaaatggttaaatgattttaaatctaaagttcaaccagtaattgattttgttttcaaaaatactcaattgaagagaattcctcaaattaataataataaaactaattttaaatcaaatacaaaatttattaaaaaattaaatgaaaatgaaaaattaaaaccaattaagggtgaacgtaatattttaattacttctgctttaccttatgtcaataatgttcctcatttaggtaatattgttggttcagttttaagtgctgatattttctctcgttattgtaaagatagaaattataatactttatttatttgtggtactgatgaatatggtacagcaactgaaactaaagcattagaggataaagttacaccaaaagaattatgtgataaatatcataaaattcataaagaagtttatgattggtttaaaattggttttgattattttggtagaacaacaactgaaaagcaaactgaaattgctcaagatattttcatgaaattatataataatggttatttagaggaacaagttatgagacaattatattgtcctgaacataatggttatttagctgatagatatgttgaaggtgaatgtccaaaatgttcttatgaagatgcaagaggtgatcaatgtgataaatgtggtaatttattagatccttttgaattaattaatccaagatgtaaattagataatgcaactccaattccaaaagattcaaaacatattttcctttcattagataaattagaacctgaattaaaggaatgggttgaaaaatcttcaaatgaaggtaaatggtcaaaaaatgctaaaacaattacaaactcttggctaagagaaggtttaaaaccaagatgtattacaagagatttagtttggggtacacctgttccattagatgattttaaagataaagttttatatgtttggtttgatgcaacaattggttatgtttcaattactgctaattatactgatgattggaaaaaatggtggaaaaaggaaaatgatgaagatattgaaaatgatgttaaattatatcaatttatgggtaaagataatgttccatttcatacagttgttttcccatcaactgaaattggtacaagagataattggaatttattacatcatttaaatacaactgaatatttacaatatgaaggtggtaaattttcaaaatctagaaatgttggtgttttcggtaataatgctaaggatacaggtatttcaccatcaatttggagatattatttagcttcagttagacctgaaaatcaagattcacaattttcttggactgaatttgttacaaagaataatagtgaattattatctaatttaggtaattttgttaatagaattgttaaatttgttaatgcaaaatataatggtgttataccaaattttaaaattgaaaattgtccaaattatattgaaactgcaaaggatgaaataaattcacttttatcaacatttattgatgatatggaaaattcaagattaagaaaaggtttagaaactgcaatgcaaattagttcaagaggtaatttatttttacaagaaaataaattagataattcaacatatgaaaatcaacctgaaaaggcagatgcaattgttggtattggtattaatttagtttatttagtttcatcagttattggtccatatatgccagatattagagataaaattgttgaaattttaaatgcaaataaattaagtatacctgatgaatttgatatgtggattcaaccaggtcattgtattggtaaaccacaatatttattcaatagaattgatgaaaagaatattgaagaatggagaaacaagtatggtggtgccaaggaatagagtaaaagcggtaatttaggaaacaatatcggcaattttggtggaaaaaattgaattaaattttttttttgtcaaaactggttattttcaagatttgatgaatctctttaaagaacctgatggttttgattacatctttattcttatattcatctctttacttttacttttaattaactttactttatcttactttgatttttccttttgcatatagtatatatagttttcataagtattattattatattataagtagggatataagcagactttaaatatgtcattcatgaggaaacctcataagaaggctaaaacaggttgttcatcttgtaaaaagagaaggattaaatgtgatgaaggtaaaccgacttgtcttagatgtgagaaaagaaatttacaatgtgtttatttacctgttttacctagaaattattataaagataaagataaagaaaaagataaggataaaagaaaagacataaatgataatgaaagcttaaaatctaataatactattattaatgaaacatcatcaattgaattaccaagttcatcattaatgaagagtaaaagtgtacctaatatgaataatttttcaaaaaatgatgaaaatttaagatattcacttccaatgtatcattatgaaagtaatgattcaaatcaatcttcaaattatgcctataataatggtccgctacaattttcaagtcaaaatagtaataatcataatgttactaatactaatactaatattactaatgctaatagcagcaaaaataataatatgggtaactcttcaatgtattacttacaacaaagtaatattcaaagtttaatcgatataaacaattcagaatggaggaaatataatcatgtcagtaatgaaaatagtaaaagtattaacaataacaatgaaacaaaatcaacttctgaaaaatcattcactgactcaataagctcattggaaccagtagtttataaaagaagttcaatttcttcaattattgacaaatcaaaacatctggataataaatatgaagaattttgtacacaaattcaaaaaaagtttagtcataaaagacatgatacagttgaaccggaaaatcctacaaaaaataattttagattaccacaaccatcaattaatttcaaaagatttgataataataataataataataataattttaataataaattttttcaagatatgaaatcattaaatgctgaaaaaaataaacttaatcattcagttagattaccacatttaaattcttattcaaatgatgaaaactttaataaaattttcaatagtatgttcataactccttcattagatttttcatatttatcaaatttacatattaataatcaattcttatcatatgcatgtcattttgaattaaatatgaaaattcaaaaattttgtacaaataatttaccatttatcttaacaaaagacaaattttgtattcaattaataatgattatgttagaatattctccattatatgaatcattatatcatgttttcacttcattagcatttatttcaatttatcattcaattattgataataaatcaaatgaaagagatccatttttcggttttgaacctgaagtttatttaacattatcagattatcatatgtcaagatcaattcaatcacttaatttagatgttaatttagaggaaacttgtagaagaacttgttgtctttacttaacatcaatttttcaaatactttgttcaattttacagccaagtcaaaaaatttgttctagaagtttcctgatgttatataaaaatatggaatttattggtgatacttttaattcatattttaaaggttgttcaagattcattgacagtttagaaagatttttaataaagaaatcttcaacttcaaatgatttatattttccaaattatttatttgatttaccaaatgtcaactattttgaagatataaacaatcatcacgaaaaacataaaaaatcagtggaactattaaatgatgaaaataaacgtatcatcaatataatggttgaaagactgtcaattgtttatagatctttaagaaataaaataaattttgattatcaagttgataattttaatccaatttttaatcaaccatatgttattgaagatgatttaattattacgattcatagattattttataaagttccagatcaatttattcatttagtttcaattggtgaaccaagaagtttgattataattggttattcaattttattattaaattcaaaacctaatcatattttcagtaaatgtcatttattaaatgaagttgaatttattttaaacagattagataaattgaaaaatgcaaaatattggaaagcttggttaaatccagttattgttgcattgaataatacagatcaatcaaccatatcatgaaacttaactccaaaacacaaacctgcgtatattctttactaaataaatcaaaaaggtaggtttattattaaccctacagtacaacttaaatagatacaaaatacaacatgcaactacttacctttttttactttctctcaactgcacaaataccctacaaatttatagagaagattaaaaattatccattaataatttaatattagttttcaaacctttttttgtagcaaaagcttctcttttctaaccctacaataatattacaatcctttttttaactaaatcatgtttttttttataaaaaaattatatactatacaaagataactaacaatattaatcaattttatgatttgatttataaagttaaaccattaccatcttctcttgccttttcaccatattttttaattctaattgcttgaacagaaataaaacctgatgcttcttgaggttcaaaaccagttaattcatccattgaagattcagttgcatcatataatttttcagttgatgatgatctacctaaaataattaaattacctttataacatcttgctctaactgtaccattaacagtattttgtgatggttgaatcattgatctaacatattcacattctggtgtaaaatacataccattgtataataattttgagtatgcagttgtaacaaaagtatctcttaatgatctaacttctctatctaatgttaaaccttctaaatcaatatgagttgatcttaaaattgttaaacctggagtttcataacaacctcttgatttaataccaataaatctattttcaacaatatcaattctaccaacaccatttcttcttgcaattgcatttgcttcaaggaataattcaacaggttcagtaatttctttaccttcagaagtaattaatttaactggtttaccctttaaaaattcaattgtaaaatcttctggagtttctggtgcatcagttggatcaacagttaatttccacatatcctttggtggtgtagtatcaggatcttctaaaatacctgcttcgaaggaaatatgtgccatattttcatcagttgaccaaggttttgccttagtttgagtaactggaataccctttgcagctgcataatctaataaatcttttctacctgcaaatcttttaaagaaaactggatctctccacggtgcaataactttaacatctggttttaatgcataaaatgataattcaaatctaacttgatcattacctttaccggtacaaccatgagagacggcaaaacaaccttcttgttctgcaacatcaatttgtgctttagaaattgcaggtcttgctaatgaagtacctaaaagataaacattttcataaataccattaacttgaattgcagggaataaaatatcttcaacgaattcttttctaatatcagcacaaacaaatttagttgcaccaattgctaaagctttcttttcagctgcttcaaaatcttcttcttgaccaatattagccatgaatgcaacaacttcataaccttcttcaattaaccatgctaaaataactgaagtatctaaaccaccagaatatgctaaacaaacttttcccttagacatttttttatataatatactactatagtaaatactattgctttatagaaagagataaaagaaaaaaaattaaataataataaaagaaaaaggagagatgaaaaatttcaagagagagtgggaacaagctaaatttataacaaaaaaagttgaaaagacaataataaatgagtcaaaaaataatgccatttggcagattgtcgacgttaaattaattaaaagaggcctcttaaaaataggtttaaattaagcgcgctactatgactctaataaaaattacctatttaggtaatttctataaatttagccgcgcctatgtgtattacgtaactgtagtcctatcgacccccttaaacttcacagacgcatcgacggcacagccgagatcctctgaaataccccataaaataaatttaaatttacctgcactcagctagcaaacacccgctaaagccctcgatttcaaatttcaaacggggaaactcttagcggtatattttattgagttttacccgctgagagacacttccactggacaagattctggatgattcattattaagctgaatataaactatggcttttcagtatttaaacaattaactttcccggtttattaatgtattggttctaattcttttagatttagttatttcttctagtaaatttactaaacgttaatcgtgtatataatatattagtaacaatcaactatgtcatcaattgaagaaattaatgcttttgcaactaaatatggtattaagaatgctaatttgattaaaactggtgctttagttaatggtgaatggattgtcgataattctgaagttttctctgttgaagatcctgcaaatggtgaacatttaattaatgttacaaatactaaaattgaagtaattgaacaaggtattaaagattctcaaattgcatttaagaaatttttaaaggaatcaactggtagacaaagaggtagaattttaagaaaattttatgatttaatgttagaaaattttgatgatttagcaattatttgtacaattgaaaatggtaaatcattagctgattctaagggtgaaattacctatgcttcaagtttctttgaatggttctctgaggaagctccaagaatttatgctgataatatcccaagtgcaactgcttcaaagagaattataacttcaaaacaaccaattggtgttgttggtatcttaactccttggaatttcccttctgcaatgattacaagaaaattaggtgctgcatttgctgctggttgttcaacagttattaaacctgcaactgaaactcctttatctgctttagctttaggttatttagctcaagaagctggtttcccaaaaggtatgttatcaatgttccctgttgatcaagaaagaactaaagaagttggtaaattattctgtgaatctccaattataaagaaaatttcatttactggttcaactggtgttggtaaattattaatgactcaatctgctcaaactttgaaaaaactttcattcgaattaggtggtaatgctccttttattgtctttgaagatgctgatgttgatgttgctgttaaggctgctttaggttgtaaattaagacaatctggtcaaacttgtatttgtgcaaatagattatatattcatgaagatgtttatgatgaattctcaactaaattaactaaagaagttagtaaatatgttttaggtcatggtttagatccaaatacaactcatggtcctttaattcatgaaagagcagttcaaaaagttgaaagtcatattgatgatgcaattagtaaaggtgcagaaattcttcttggtggtaaaaaggctccacatcttggtccaaatttccatgatttaacaattttaggtaatgttccaaaagatgcacttgttaataaagatgaaacttttggtccattagtcccattaattaaatttaagactgaagaagaagtattagaattagctaatgatactgaatatggtttagctggttatttcttctcaaaaaattattcaagaattttcagagttggggaacaattaaattgtggtatgattggtgcaaatactggtgctttaggtgaagcttccctgccatttggtggtattggctggtccggtttcggtagggaaggttcaaaatacggtattgatgattatactgttattaaatcaattgttattgatggtatttaaaatttctgtttttttatatattattcatcttatcttatactatttataaatttatatttactgttaaaattgtgttttactattacttgctataattaaactattttaatcctgctaaaactgtatcaattttatcttgcattgtttgctttttatcagttctagtaccaactctgatatcactttgaacacgtaaaatacccaattcatgaactctttcatgtagtttaccaatcaattccatgacttcagtccatggaccttcaattgtggtacctgcactatgtaatgtgctttcaagtccactttgttgaattaacttttcacattcaataacatatttagagactgatggtgtagctgttccgattggaatcaaacagacatctgcaatacaatttaaagtaaccatgactcaattgttttaaaagaaatggtaattcaaataaagtcgacccatataataactaagattgaaaaaacctcatcatagaatctgtcgctatagttttttacatcaacatgtttttcactctgaatcccaaattcaaattctttttttctgaaactaaataaacaatggatttcacagtaccgaacaacgctaccgctgatattgatctgcaactaactaggttagttaaagatttccatgatggttatttaacagagaagggttatataaaaaaaagaatggaattattacgttcagtacctattgcagaaactgggtctcaatactcaaattctacctcaaataccaattctaatactaatactaatacaaatactaattcaagctcaataaagaatccaatatataataatatttctagaactagttcaaatgtacagtctgatgactttttcaattactctcatacacattcccaatctgttgatggtagttcaacaactcaaccagttttctatgatgatgaaatacttaataaatataacaatatgactaatcattataatccaaatataaggaaagagttacagaaaccattggatccaagagatatctcatcacatgcagatactaaatatgaatttgataatttagcaatgatattgcgtaaacgtgcgaaactgaatgaaagagaacctgctgttttgattattgatgaaagaggtaaagaatcagaagttattacctgggataaactatatttcagagctgaaaaaattgctaaacaaattaaaaataaggctgctttatatccaggtgatcgtgttggtttaatttatcaaaatgttgaagtaattgattttatggtggcaatttatggttgtttcttggctggtgttgtggctgtgccattaaatagttcaatacctacaagagaaatggtaacaataatgaatgatacacaatcacatttatgtttaatgtcagattctgttttcaaacattttgaaaaagtttcaaaacaaaataaaacatctatttggccaaagggtatggttgtttggaaaacatccgatatgggtacttataaaccatctaaaaaagatggagatcctccattaaaagtttcagatttggcttatattgattatacaagaaatacaactggcgaattgaaaggtgttgcaatttctcataaaactatacttaatcaaatgaaaatgttggagaaaatattaacttcatcatcggaaatgagagcaccattagtaaggtcaacattaaaaccttcaagttcaaagaataattatttatccacattagatgtgagaaattcaattggtatgatattctctttgttgtttagtgtttacagtgggaatttacttatttgggcatatcataaagttgcagaagttcctgggttattagcaaatgtaatgtcttcatatagaacatcggtatgtttaactgattattatacattgaaatcggtggtatataattatcaatcattccctcagactacaagaactttcaataagagaaaagttgatttgtcttcattaaaatggtgtttaattgacgcaattactgttgattgtgaatttaatgagattttatctgatcgatggttaaaacctttaggtaataaatatccgaaaaaaaccatatcaccgttattatcattaaatgaacaaggtggtgcaattgtatcaatgcgtgattggtatggtaatgaagaacaattgggttgtgtttttaataaaaatgaaaatgttgatgaattagacgaatttgcagatgataacactatggatagattatctgaaattttgattgataaagaatcactatctacgaactccgttaaagttattaatgactcacctaaaatgcaatcatcttcagactccaatttaaaatctacatcatatattagagttggtgcttttggatatcctttacctgattccacattagctatagtaaatccggaaactaaaatattaagtggtgtttttgaagtgggtgaaatatggttagattctaattgtatatctgggggttactggggattacctgatgatactgaaactgtttttcaagctgagtgttctgactatgaaggtattttgagtttgaaatttgtcagaactggatatctaggattcatctataatggacaggtttatgtgcttggattatatgaggatagaattaaccaacgtgttacttggtatgaccaatatttagaattttctaatgatgagaaggataaagataaagagaaaaaggaagaattgactaaatcgcattcaaggaatatatcagtgacttctgatttagaaagttactataagatgcaaagaaagagaaatgctcataatctggacaagattgatttaacacaaaatttatccaacaaatatatttacaaatatcactattcgaatcatttagtgaaaactttagctagatttattccttatttcaaagactgtgcgtttttcaatatcaaagtgaacaaagagtatttaccagttggtgttatggaattagaattagcatcagatacatccagagcatcagaagttgaagttcaatccacagtgactgaagcatttaatgtacttgaaaaacatcataatataaggccatttttcttgattgtaactaaaactggttcactttccagatcattgaaaagtgggagagtagaaattgctaacacattaaccaaaagaagatttttagaaggtagattacccagtgtttatgtttcatttaaaccatataattcattaggttcagtttatcatggtgaagatttaatcggaggtatttggtcaccatactgtacatcaatcagatctgaaatgttaagttatgcagattatcaaagttcaggtttggatagtcgtgattcatctgttgattatagatcacatgcgaacttaagtgattttaaatcacccgttgagcttctggaatttagatcaagtaaacaatcagatgaattggcatttgcacaagttgaagggctagtcatcaaggaaaataaacaattaactacatggtctaaatttgaaaataaggtgtttaccatttgttcttatattttagaaaagaaaattttatcagcgggtgatgttgttattttgatgtatcctttatgtgaggaatatatttcatgtttgtatgcatgttggatggcaggatttgtagttattccaatgcaaccaattggtaaagatattcaaactcttaatgaagatgttgaaacgttagttaagattgttaaagaatataaagttcaagctatttttgttaataatgaatcagaactgagtatgaagggtaaacaagtcacttcacaaatcaaatatctttcaactagattgggaatcatatttccaaaacttagaaacaccagtaaacattccaaaacttcatctagtggtaaatcaacatataagaaaatggagcaatacagaaagcaaaggaaatcctcaaaattattttcatcttcaacatgtatgttatggttcaatctttcttcagataatgattatactgcttaccaattaagctctaaaaagattatggatatgtgtttgagtttgaaagaaacatgtcaaatgagtggtaattcaccaatagttggttgttcagatcattcattcggattaggatttttgtttggaagtgtactaggtctttatttgggtacaaccacttatttgatgagttttgaagaatacaaactacatactaagaacttttatcaaatcattgagagatataaaattgaaaatgtttacatcagtcataagctgtttgtctatgcgttaagtaagaattcactagttaaaactgatttgaagaatttaaaaaatttaatgatatcatatgataatgatcgtgctgatgcattactgcacgttaaatataaggataaattactgttatccaatatcaaaccaaaaaatgtttcacatgtgtataatcatccaatgaatccattgatcagtacccgatcattcttatcatttgagccaacaatattatggttagatccacatgcattatcacaaggatatataagtattgtcaatcctaaagattcaccatctgcaatcccagttgttgattccggtgttgtgtcagttaatactgaagttattattgtcaatccacaaacagagaaagtttgtaagattggagaatttggtgaaatatgggtttcatcaaactcaacggttgatgattttgcaggtaaggataataatccagataataaagaatttttaaagggtcaactagaatttaatcaaaaacagtatcttagaacgggagattttggatttttacatacagtcaatcaaactgataaaactagaatgattgaattacaattactatacaatattggtaaaattgatgaaacattcgaatactgtggattaaattattttgcaaaagatattgaacattgtatggaaacattcgatggtatttctaaatgttgtgtctttaaagcaggtgagtatactgttttaattgcatctacgtcaacttcaagaagtttaagtacaattacaccactgatgattttaaaattactgaataaatttaaaattgttgttgatattgtttcatttgttgaatctacaggtatcctagtttcacgtaatggaatgattaaacgtagaacattggctgaaaaatggctgaaggggacattaaatatcaaaaaatcgtttggtgtttcatatggtgaagcggaaatggttaaagccattaaaatgcaagaatgggttgaagataaattgactaaataatgtatcgattatcaataccctgtgtaaaatttgtataatattatataccaaaacttattcactatttccacctttatgatatacttaaaactcaaaagattgaaattgacagctagtcagagcacatatttgcttttttgaaatttcatatttggatagcttcacaatcaaagataattcttcttaagatgacgaatttaattaatgatcttggtgcttaccccgattgaaaaacaaaaaaaacaaaaaaaagattacgtaattttgttaatgaaatatcacatcatgaaccacgacacgaaacatgttttactttaatcatatttaagtgagtttctcttagtaatggacacagaagagagattaaaccttctcatagagttgtttccaacctatgataaagagatattgttggatatattggtttcatgtgctggatcagtaaaaaaagtcaaaaaattacttttggaaagttgtgttgaaataaaagattcaattgcaaaatctgaaaacaagttggaacctaagattgaaaaacaaccaataaaagaaaaaaagccaaaaatcttagaaactaacactcttaaaaggaaaagagaagaaggacaagttgttaatcaaacatctctttcatctttacttaaatttcccaaaataaactcaactgatacacgtaaaactataacattatacacaaaagaagatattgagagaaacttgccatttgttcgtataatacctaactttctaccaaatgatttgaaggaacaagttactaattcattaatgagtcaaagaatgcttttcaaagctaaacagttttatattgctggaaatctatgtacatcatcacaaaaaagtattatttatagtaatgatgacaaaaccgattatgatccagtgtataaatctgaagatttaagaccacatccatttacaaatgagttaattaaatgcaaattatatgttgaaaaaaaagtaaatgaagtgttagaggagtattgtcagaagaataaactacctgaatatgccattactaagaattggaaaagtgacttttgtcttggtaattattatccagataataaatcacatttagatttacatagtgataaattaactaacattggaccacttccgacaattgcatcattaactattggagcaacaagaatatttagaatgagaagatcttatcctgcagattcagttattttcaattttccagctcctaataattcattaattattatgctcccaggtagtcaagaattgtttaaacacggtgttccaacattaaaggattcattatatgaaagagataaaattacaaaagatgcacgttttaatcttacttataggatgcaatatgcaccatttgatgaaaatgataaagttttatgtgatatttgtaagaaaagaatgattttaagaagacttttcaagggacctgatattggatattacgtttggatgtgtatgtcaagttttaaaggacaagaatgtaaaggttttaaatatgcagattttagaaaagttaatgataagatgaaccttttcacaactgaaaaatctgaagctacacggtggttatcagaatctgaaaccctgaatgattaagtagttcttttagaaaagttttttattacatatttctatataacatgctaatgaaaagtgtcatgaaaataaaaaaagtaaaatagtaagtcaaaataaaaaagaagagaagtttttaaaagggttatgaagtgttgtaacgtggaaaagagtaaaaacaaacatgagcattgtattatgttatgtacatgaacaaaaacaaagtagctgaaaaatgtgtattgatcagctgaaaacaaaacaaatgtaaactaaaatatgtaagatagtggataatacttaattacgtaatggaagtaataagtataaaataagtttactcgttggaccttttatttgtgtaatagacagcgagtagcaatgagacggttggtattaattagtagattgttctctaactaatactctgattaatgtcccctctcagaagagagttatacaaagttatacaggatatcatacttatttatattacaatattaaccattccttaatatagttaattaaactattccttatcaatcataccactccttatcataattaattcaatttcaatctaagtcattcctttcttactccgacatctccgaacctccgtatctcggaattcctatttccatcttatcatctttacgtaatcagcttacctaatcttcacgtggatattattgaacaacttgtatttattcccttacattaccccggctgttgggaaacatcgtccctgatgttaaaattaaattaaatcaaatacttaaacaatttgctcatgagcacaaatcatcttggcattatgaaataaactatgacgaagtgattccgaagccgtattaaattgatcagcagtaatagttgtagcaagtaaaggatcacaatctctccaataaacatcaaaagtattcttttcttcatcaaaaccagcaataccacacatttgattaattcttgataaaatttcagcattagttctaggtggacgacataataaatcgactggaggaacatatggacgaaaatttttaatatttaatactctatcctttttattaatcttaggtaaatcaacttcaaaagcattatcattaatttttttcaccaatctaaatggaccataataagcaggttgaattttataatatttagcaaaagcaccaaaagcatcacgatgcaataaaatataatcaccaactttataattatgaaatctatgtgatctattatgatatttttcattcaatctttgagcttgtacaatattatcttgagcttgagttaaagttaatctcatacgtctagcatattcttgagcatttggactatatctattatcatctaaattccaactattaacacttttcatagaatctggtttatatcctatagctaattcaaaaggagaacatttaattgaatcatggtaagtactattataagcaaattcacacattggtaaaaattcatcccagtgtaaatgatcatttgaacaatgttttcttaataattgatttaaaactttattaactctttcagtttgaccatcagtttgtggatgattagtagttgaaaacaataaagaaacaccaaagaaaaaatgaatagtataccaaaatttattcataaacctaatatctttatcactagttaatctttttggaaatccatgatgtttaagaaaataatctaaaaataatttagcacaaccttcagcagttaaagttttcacagttggaataaaatgtgacatttttgaaaatctatcagtaataaccataatcatatcatgatttgaagtagttgttggcaaaccagtaacaaaatccattgtaacatcagtccatctaccttcaggaacaggtaatggttgaaataatccttgagttttctgagtagaggtgttattttgttgacaaacaatgcatctattgcaataccttttaattgtaggcatcatattaaaccaaaataatgaatccattaaagtttgataagttttccaaggaccaaaatgaccagaagtaggattattatgagcatttttaataaatctttgaggtaaactattataacgaggaataactaatctattgcaatcttgttctaataatgttttataataaagtaaatcatttttaagttgataatgtttaatatggtggtttaaatgaataggaatttcagatttatttttcaaagttgaataaacatcagcaagtacattatcttttttataacctttaataattaaattctttaattcatcattcataggaaaagtagtaacagtaacttcagtattattaatttgaatattattatttgaatttctatttgaattacctaaaaatttaatatgattaacttctaaagcatctttaacagacaatttttcatatggataacgacttaaagcatctgcggcagaattatctttacctgcaacatattgaatttcaaaatcatattgtgataaataatcaagccatcttgcaaccctagttgaatcaatcaaattttgatagcgtagataaattaaacttttatgatcagtaacaataacaaaatgtctacctaataaataatatctccaattttttaaagcttctacaactgccataaattctctatcataaataccataatttaattgagctcctattaatttcttagaaccataagcaattgtacctcttgttttaccattttcatctaattgttctaaagtataacctaaagcactaccacaagcatcagtatgaacaacataagtacaatcattattccattttggatgtactagaataggactgttaattaaagcgtctttaagttgattaaaagcattagtttgttcatcttcccattttgattctttggtaataaatttatgaattggtacagcaatcttagaatgattcttgataaaacgtctataatatgaagttaaacctataaacatttgagcttctttgacagtagttggaattggccaatttttaaccttttcaattttatctggatcagttttaattccatttttagtaataacatgacctaaaaatcttaattcatcgtaaaagaaggcacactttgatttcttagcaattaaatgatgttctcttaatgtagataaaacacttttaatatcttcataatgttgcttataagatttggaataaataaaaatatcatctaaataaacttgcacacatgtattcaaatatttggataagatagtattcatcatacgttgaaaagttgctggagcattagtgttgggaaacatcagggacgatgtttcccaacagccggggtaatgtaagggaataaatacaagttgttcaataatatccacgtgaagattaggtaagctgattacgtaaagatgataagatggaaataggaattccgagatacggaggttcggagatgtcggagtaagaaaggaatgacttagattgaaattgaattaattatgataaggagtggtatgattgataaggaatagtttaattaactatattaaggaatggttaatattgtaatataaataagtatgatatcctgtataactttgtataactctcttctgagaggggacattaatcagagtattagttagagaacaatctactaattaataccaaccgtctcattgctactcgctgtctattacacaaataaaaggtccaacgagtaaacttattttatacttattacttccattacgtaattaagtattatccactatcttacatattttagtttacatttggtatgtaagatagtggataatacttaattacgtaatggaagtaataagtataaaataagtttactcgttggaccttttatttgtgtaatagacagcgagtagcaatgagacggttggtattaattagtagattgttctctaactaatactctgattaatgtcccctctcagaagagagttatacaaagttatacaggatatcatacttatttatattacaatattaaccattccttaatatagttaattaaactattccttatcaatcataccactccttatcataattaattcaatttcaatctaagtcattcctttcttactccgacatctccgaacctccgtatctcggaattcctatttccatcttatcatctttacgtaatcagcttacctaatcttcacgtggatattattgaacaacttgtatttattcccttacattaccccggctgttgggaaacatcgtccctgatgttaaaattaaattaaatcaaatacttaaacaatttgctcatgagcacaaatcatcttggcattatgaaataaactatgacgaagtgattccgaagccgtattaaattgatcagcagtaatagttgtagcaagtaaaggatcacaatctctccaataaacatcaaaagtattctcattaatgttttagaaatcttttcaaaggctaaatttttctcccaattattctcttcattaaaagcaactaaagaatccgttaaaattggtgccagtaatgttttatcagtcattctgcaaaataatcaatttgaaaattcaagtgatgttttatcattatatgttgatgaaatttttaaagttctcaaaagtttatcagctacagccgttgaacaaaaaagtttggtgttgaaagttttacaagctgtatctattaatgatacacctacaagtaataaaattatcgatttattgattccatatatcgcaaaggagaataacgaacaaattttatcaaccgaatgttcaatcttattaaatagatttgtttacttattattggaatctgatgttgttgaatcaaaggagaaaatattcactttaataaataatggtattaatgataaaaagatacctgttaaaatttcatggtgtacctcattagcaaattctattacatccgttgatcttaaaaataatacatcatcagaaactaagatacttgaattattaaattcaggagtttcaaaatcattattacaaacatttgatgattgtgttaatgccccattaccatgtattaataataaatcaatttcagcaggttatgcatctcttgctattcttttatatattgatgaaatttattccaatactgaattaaaacaaaaattacaagacttcaacgttattgaaaaagctttaaatgataccgaaactaaaatgtcatgttttgttaatccaaaaataatttccaaattaacatctgaatttgcacaagaatggtatatacgttcattattccatatttcacgacatttaactgaatctttaccatttttaggttttgctattttatattcaacgatttcaagaaatattacaccatcttcaagattattagctaaaaaattacttaaatccgcttatgaaaataatcaaaatgttatcggtttttcattaactaatgcattatataatttaattgaagattcatcaattaattctgaatttaatttagattatcaatatttattaccaacaatttctactactttccatacttttgataccattgatcaatcaattttagaatctcaattagttgatttattattcattttcgaacataacttactttcaaatattcctaatggttgggttagtttatgtcaaaaatgttttgctgatccaggtaaaattgtttctgaaaattctaccagcattattgaaaagatctctaaaattcttgttgatccatcagagaaagttctaaataatggtatttttgatgctgcttgtaaaacagtttcaatcatttccttcttttcaccagctgttattgttccaaaattatctcaattaattgaagaagatttgtcaattgtttcaaaattagatattgatgattctaaacttgatatttggaaaggtactgatgatgttcttgttgtcgatgttttacaatccaaatctagtgttaatattgctaaatccaaagatgctgaaactttgaaatgggaaagagaagttcgtaaagaattagatgctaagaaaaaagtcactaaaaaattaactaaggaagaacaactcaaagttaatgaacaattaaaattagagaaagaaattagaaattcaattaataatgattacttaaaacttcgtcgtggtttagaaatcattatttcactttcaaaacaagctaaatttgttgataatggtactgaattatggtttcctgttgctatttcaaatattttatatttattaaattcatcatctgctgttaaacttactggtgctttatcatctgaatgtttcttatctctatctgatgttgttgcaactgattctttatcaggtacttccgatatgaaatttattggttcatctactttaagattattcaatgttagtcatgttcctgctaaatattctggtatcgatcttaacgaattattagcatctcaactattcagtttgaaattatgttctgataaatcattattcactaatttaatgttaatgtacgttttaccattattaaccagagtcattgaaattggtaaaaattacattttgaagactggtaagaaaacagttaaagttaacactgaattctcagaagattcaccagaagaagaacaattaattttagctttagaaattatttcatccaattcagatttatttgaaaatgaatccattccaagaacctcaatcattgaacatttaatagaattattagcattaccatccaaatccaaaaatgcaaaagagtgttttgtttcattatgtcaaaatatttcagtcaatatttccaattctgatttatcaattattttaaaatcattaattacaccaactgtttttgttagaactgcattacttgaagttttagatcaagaatttgatttatctgaaaaatcatttaatgaagaaatttggatttcatgttttgataatgttactatcaataaagatattgccgaaactatttggaatgaagctggttttaaattagatgaaactgttccttccaaattaatcaaatacttaggcaataaggataatggtattagattatcaattgctagatcattagctgcatctgttattcaacttgaatccaatgatttattctgttcaactttatcagatttattaaacttatacaatgaaatgtgcaaacctcctactcctgaagttgatgcttacggtttagttattcataatgttgataccatgaaagatagatgggaacaacgtagtggtgttgcacttactattgcacatttagctccgatgttttcaatttcttcagaagtttcaaatttcttcagatttttaattaaagatagagctcttggtgataaggaattattagtcagatcagaattacaagaagctggtttgaaaattattgaagctaatggcaaggataatgttgaaattttaatttctatttttgaagattgtttggctgaaaaggatgaaaaatcaaagattcaagatatggttaaagaatcagttattattttatacggtactctggcacgtcacttagataacaatgatcctagaattgaagccattgttaataaattactacaatcattagatacaccatctgaagatgttcaatatgccgtttctgaatgtatttcaccattagttccattcattaacactaaattatctaaatacattgatgatctttttgaaaaactttttacttctaagagacttgcaattagaagaggtgctgcttatggtattgccggtttagcaaagggtgttggtattaaagctttatgtgaatatgatattattagaaaccttactgaagcctctgatgataaaagggatactcaaaagagagagagtgttttatttgcatttgaatgtatctcccaagcttttggtccattgtttgaaccctatgtcattgaaattttaccaattgttttgaagagttttggtgattcatctgcagaagttagagaagcaaccgattatgctactagaattattatgaagaatactacaagttatggtattaaaaagatgattcctcttgctattgaaaatcttgaagatattgcctggagaacaaagaaaggttctgttgaattacttggttctatggcttacttagatcctgcacaattatcatcatcattaccaaatatcattccagaaattgttggtattttaaatgatacacataaagaagttagaaaagcggctgatgctgctttgaaaaaattcggtgaagttattagaaatcctgaaattcaagaattagttccaactttattaaatgctatcggtgatccaactaaatacacaaatgatgcattagatgctttaattaatacacaattcgttcactatattgacggtccttcattagctttaattattcgtgttatcgatagaggtatgcaagatagatctgctaatactaaaaagaaagcttgtcaaatcatcggtaatatggctattttggttgatactcatgatttaatgccatatttaggtcaattagttgttgaattaaatgaagcagttgttgatcctgttccacaaactcgtgctactgctgctcgtgctttaggttctttagttgaaaaattaggtgaagataaattcccaggtttaatcgctaacttattagctgcattacaagatgaagaaaaaccaggtaatagactaggttctgctcaagcattagctgaaatcattagtggtttaggtatttctaagttagatgaaatgttaccaattatcatcaacggtacaacttcatccaaaccgtttgtccgtgaaggttatatgccattattattatttttacctgtttgttttggtagtcaatttgctccatatttatctcaaactattccacctattttagctggtttggcagacactgttgatgaaattagagatgtttccttacgtaccggtcgtttaattgttaataattatgctaagaaggctgttgatttattacttcctgaattagagaaaggtttatctgattataactcacgtattagaatgtcctctgttgaattaactggtgaattattattcaagatttcaggtattagtggtaaacaagaattagctgatgatattagtttatctaagaacgtttcaaaggctttcaatgaagttcttggtgccgaaagaagagatagtgttttatctgcgttatttgtttgtagatcagatacttctggtgctgttagagctactgcttccaatatttggaaagcattggtcgcaaatactccgaaaaccatcaaagaaattatgccaacacttatcagtattattgttcgtcgtttagcttcacctgatgaagttcaaagaagtattgctgctgcaactttgggtgatatgattagaagagttggtggtaatgcattagaacaattattaccaaccttaagagagacaatgtacagtagtgattcagatgctaaacaaggtatttgcattgccattcatgaaattattcaatctacagcaactggtaatgttattgaacatcaagatatatttgttagtgttgttaaggaagcattagttgatccaaatccaaatgtcagagaatctgctgcattggcatttgatgccttacaagaatcaattggtaattctgctgttgatgaagttattccacaattacttgagatgttgaatacttccgatggttctgatgatgcattatgtgcattacaagaaatcatggctactaaatcagatgttattttcccaattttaattccatcattattaactcctccaattaatggtcaagctattggtgcattggcagaagctgctggttctgctctttacaaaagattatctactattatcaattctcttgttgacggtattgctgagaacctcggtgaagaatctgatttatactctgctttaacacgtactatgttatctgttgattccgatgctggttgtcatccattaatgcaacaaattttagctattatgaaacatgatgatatcaccaagagaaacattatttttaaggtcttacctgaatttttcaaagaaaccacattggattactcaatttataccgaagatgttgttactagatgtatttacttattaaatgatgctaatactgaacttgctactaaggcttgtgaaactttaaccattctcatcaaaaagcaatctaaacaaacattggaaagacttacaatgcctgcacaacaaagtttatcattcattcaaaacgaaacaaaggaaatttttgcattcactttaccaaagggtccaaattgtattttaccagttttcttacatggtttaatgtatggtaatccacgtcaaagagaagtttctgctaatggtatttctattattattgataacacacctgcaacaggattaaaaccatttgttacacttattgtcggtccattaattagagtcattggtgaaagattcagcggtgaagttaagagtgaaattttattagcattaaacaaattgttcaccaaaactccacaatttttacttccatttattccacaattacaacgtacttttattaaatgtttgtctgatccatctaatgaactattacgtactagagcagcaaaggctcttggtactttaattaaataccaaccaaaggttgatccattagtcaccgagttgttaaacaatgctaaggctattgattcaaccaatttagctttgaaaactgcaatcttgaaagcattacttgaagttattgatgttgctggttcaaagatgagtgaagttagtaaaaatggtgttatgcaattagttgaagaagatatgtttaatgaagatgccggtgtaaatggtgctgttgcatatgcaagattagttggttcattatcaaagattttagaatcttctgaattaaacaatatgttaagagctaagattttatcatgtgatttgaatgatgaaaataattctagatttgctattttaacattaaatgcattcctaaaagactctgcaagtatggtcttgaattgtggtttattacctgaaatttgtgaatttatgattaatgcttcaaattctccaaaatcatatgttagtgataatgcagttttagcaattggtaaatttttattatcacttgataaagttgaagaatttgatcaatcacaaatcaataatttagctaaacaattatgtgttacaatgaacaaacctacctcaaattctccagatacaagaagattttcattggttgttgctagaacattatgtagatatcaatacgataatgttattttaccaaacttaaatgatattattccatcagttttctcatgcgttcgtgatccagttcttccagttaaattagctggtgaaaaggcatttttggctgtgttaagattagttgaagatgaatcaaatagtataatgacaaaatgggtagaatcattaaatggtgaacagactgttaataatgcagttggtgctactttacaattaagatcaattactgaatatgttaagagagttggtttaaggttaggtaatgttgaaagagaaagaattagtgctggtggtgataaggaaactatgttctctgatcaatatgaagatgaaaaggaaatatgggctattggtagtgttgacttatcagaagaatagatggtgtttactatattagatttagtaaaattgttttgtgtttataaatttttatttagagtttttttaaaacttaataatacattcttagaaaataattgtgctgatggtaacagcagtcgttagaatataaaatgttatttaacaatgtaaaatgaatgtgtatagtataatgctaatcatgaaataactttctctatttcgttcaatagttcattacttatttcggaatatggtaaaccacaaatggttgatattaactttttgtaaacagatagttttgatttcatcatttttaagttgtttgcgtcagattttgatatagttgagtcaagaaaagcttcatcaaaggaaaaatcattattatttgattcttcatcaatatgcattgtaactctcttttgaattatttttcttcttattatttgtaataatgttaattgaattgctaactccaattttttaccttttggtttcttcaaatcttcatcgatattatcttcttcgttacgtactaacttggcaatttttagggcctgagaacgtccataaagatcaaataaatgctttgtttgattttgtagtttggaatctatcttagacaaattttgattgacaaatgatgttatattttctgagtccaagcttgccagtttattaaaatcaatattagatatatcctgatgactacatttagctatctttttcagtaattttccatttttagttgtcaaagattgaatattggagttcaggttgtttatactgtcaatactataagttaattgatcagttttattttccaatgatgacttcaatttgcatatcacgttcggtaaaccattaacaaaattatccagctcattaaaagaaatatttgattttttaaccttcaaatcttcttcaatagattttgccttatcagctacatcagaaataggtaaatttgtttcagctttaattactttttctttgataactttactaggtgtaggactaagtaatgtatcatttctattgtttttatttgaagtaaaactatttgtcatgatagcatcaaacatcacattctctttatcgccgtcttgatcttcactttcgggagttctttgggcatcaatagtatgaggtgtatctttaactttatacttaatatttgaatcatatgaactttccaaaaatgggttcttaacatctacaattagtgaattatctttgttggtttggctttctttgctaatattttcattatagttatttatattgacatgatctaaaagtgtataatcattatttcttcggtaatttttatttccaataaaattatttggattaatattatcctcaaatataggttgattttctaccataacattattttgatttataattgtgttataattttcaaattgctctgattttttgtttaattctttgattatatcgggatgaatattatgccaacctccaacttttgaaacatcagctccattttctaataatagtaaaataaattctttacaatttgaacgtaatgcaatatccagtgcactttcaccatttaaattacaatgattaataagaagatcgagtaatttcttcttatcattagtagttctagaatttctttctgcttcattttgttgatttttaataaatgttaaaatattttccagatagtataatgtagctgcgattttatcttcatttgatgataattctgctaaatagtgaactggagtattttgatgagcatcaggtacaatcaaacaatgttttaataatggcaaaatttcatgaaagttttttgagtcataagaattgttaaaatgaattagtttagataatgcattcattccctgaatatttaataataatgtatcagcatttaatttagttaaaatttttataactttaagagatgcaagtgcacaagcccaatgtaatggtgtatgaccttcatcatcaattgcttgattaacatcaaaatcttttggtggattatataaaaatggtggtatttctgtatcatcaacaaaaaaacttattaatttttttgtaaaatatgattgattatcaataaattcatcaaattggtgattattattaaaactatttccattatatgcacttaaagctgaatcaattgaaccattttgttctgtatttatatgaggagatgaatgatgacgtgtatgcctgtatatacttcctgggctttgaagcatatttaattgtgcttttgatattgctggatgaactctttcttcattatttacatttaaataatttgaatattgttgttgatattgcgtacttgatctaggtctgacaaaactattattaacatctattggtatataacttctatcaggtgatataattgattcattaccaaattgcatatgtgaattatcagtggatacaactgaatcatttagttgattttgaacatatgaatcattttcgtgaatagtttgcacactttgagatctataaaagttttgatgttgttgttgtctatcaaatggttcggcatatttaagttggtgtgatgaattttggtattgatgatgtggatgttgattatgctgacggtgttgttgcgcatgatgatgaggtggatgatgaggtggatgttgttgttgttgctgttgttgatgtagtttgtgctgttgctgctgaaagtattctaattcacgttgagctttcaattggtaaggttgaacattatgaccaaaaaatgcagcatccgagttcaatcgattgtttgaaacaggaggagctgaatgtggagttggagtaaattcaccaaaattttgaggtatatgtgaagctgaccttgatttactatgtaatctaattggagattcattatattgaccaaaagttggaggtaaagtaaggggtaaagcaataggctcaactcttaaaggtgttgattcttgaatttttttcaacttttgaggagaattgagctttttaggtaattcatttttaatattattattatcattaatattataattgtcagtagtagcaaaggatgaagaagattcaattatttgaggtctcttcttatttaatgattgattatccatattggaagcaatggaagtggaagatgttaaattttgtttttgtttttgtgtagtgtttgaagtatttgaagtatttgtagcatttgattgtttatttgtagatgatttatttgatctggtagtagatttaacttttacagcaatttcaggtgaattttcaggatcgaaaaataaaacatttaaattctccctttgaatattatgtttcaaagctaattcttgagcaaaatccagtggtacccatgttccttggaatttaccatgaccaccttgaacttttttatgaactaattgatgaacttctctctctaaaatacgagttctttgagttttaaggaaaccagcaattttcaaaatttgagttgcattaacccaattatcatcacatcttctcatcaaaggatatccattgattatactttcatagacatctatattagagtaagtggtcttgtatacttcttccattccagaggtgggtaaagatgctagaataagaataaaattgagagataatttggaaagtgtataaaaccttatattaaggaccccccagtctgtgatgataactgttccagtgaaaatcatggacaatatactaagatttcccttttcggcgataattcacaattcttacacgcactcttcaattttttcatttttcgtgtcgtcatttaccacgattacgtaaggcggctgggtaaatttatctttcatcatgaatttataatccattccattctgttattcattaatcctttcttgtaattttctactggtactaagcctatagaagtatggagaaggggaaaatatacatgcatgaaggtgcagctcaatcatcaactcaggctttgactgatccacccctatattctatctttggaggaagaaatatagtcttttcagaaaatcaagatgaagattcaaatttatacaacaatctcaataaacttaaggaaaataaggtaggaaatcagacaacaaacactcaaaatacatataccacagcttacagtacaataactttttataactttcttaaaactttattatttggtgttatcatattctttcttttcaataatattcatgaaaataatccaaatataattccagcttttactacacatttcttaaattttatagtatcacatgaaagtaccaaaggtttactatcaatttttctgttaaattcattattacttgatgtttcaattttaattataggtttattcttaaataattatactcatttgaaaaataataaaactaatcgttcatcatttgttcaactgattgttgcacttattggtatagtttattgttttaaaaaattatcttggaattcaacatatcaagcagatttattatttattttagttaatgcaatttttgttaaatatactgattgttcagttactgaaaatttaacaggtatgattattttttcatcatctttattatatgattcattatttaatgatattaaatcattagatattaacctgtggagagcttgttttatgtttttaacatcaatagttttaatgaaatcaaagaaaacaaatcatttattttaatctgcataattattgtgatttcaccaaattaatacagttatttacttaccccatattcttttctttcttctacgtatatcccacatatttacatttttaaaaaaatatattttcgacgaacaaaatagcttaactatcaagattattataattataaaaaaaaattaaaaaaaggtaaaaaaaaaacgtatactaaacgtaacaaagttattatttaatgaaaatatagccacctaatgtttcaaaattatattgattaattatgtttttgttcttaataatatctaactaattagatacatcagatacatcttcttctaattttgatttatgaataacgggacttgagacactgccagcagcaactgaatttctattaattctagcaacattttcaatttcagggttatgtaaaggattcaatatccctacttgttcaggttcatcaactttaccatgagcttttgacattgcataatcacctgaatcgaaaaatttcctatcctttaatttaccacgtaatatatcattagtttttggtaatttcccatataatttatataattttaattcttgaggactcaatgatgataaatcaacattatttgttggtggtgtgtatagtggatcgtttggagataaattactcattgtattgtatattttaaatgatattgagtgactaatacttattcaaagacaaggcacacatgccactcatctccttataagcctttaatagctcaaaaaaataaatcatttgccacccgcgaacttggggtaattcaaattcaaatttcaattattttacgtccccgggtaatgcagagtcgcgtcgcttgcaatgttagtggctcatctattttaattgttgatacttcttcttcttcttcttcttcttttgcctctggaagtatgtgcactgttacatgtagtagttgggatagggggaatttgtgataagttaagcgttcagagattgtattaagtgtagagttttcatctgcaattaaggaaatatatttattttctaatatttgaattcttgaaaatgtcactgattttggtaaatcaattgattgtaatacattgtcattactgaatgtctctattaaggagttcatttctttagttgatagtgtcatattataacataatgttaaatgtaattcatttggaagtttggtcaatggatttattaggcaattcacatccattctaatatctgatttattttcaaattgattaaaaatttgttgaaaagtttccaaattatcattacaaggctctatttttaaataaatgaatgtagtttctgttgaattggaactagttgaaactttatttgcaaaaagtggagttttggaatatttattgaatagaatattagatggtgatattaactctttattgttattattctcttctttgtcattatcttcatcggaatcagaataatatggtactaaagacatacttcataagaagtgtgtgtattgttctattcatcattaaaagtgcagtaaaaactttaaataattacgttatcgatgcgtccagtcgtcaaaacagagatgaaaacaaacgcgctaacaataacatgtatttttgtttacttttcaaatttatcaaaagattaatttgttcaacggtttattcattttgcagctgtggttatagtgctttccaagtacaagcaaaaattatctccaattggcaaaacaattaatttcaatctttttttcctgaattgaaagaaatatacaatagatatagaaagcaaaatattgtctaaataaccaatattggacaaaaaataatttacattttcaaattcagcaattatgtacactggatctacttcagaattccaaatatacaacgataataataacagaagatcatataatcctttcattgcagattcatttggaagtcaatcatctttaatgacgtcagattcagatgaaacgtatgataaatatgaggaagaacttttcaataatggtaatccatttaaatcacccacaactccaataactccattgactccaataaataataaaaatgttttcaatattaatggggatactaccattaatgaaagatttatgaaacggccatcattgagaatgcttcatgatgaaaattcaaatataataaagtctccaataaatcgaataacttcaagttataataataaaaataaaaattctccaattaaatcatctaaaacatcaatttcatcactatatgatataactaatatttcaagtgctagaagttcaatacgaaataataattctaatagtaatttaagatcatattctttacataaaaatgatagtacattatcaattgaacaaaagaagaaaaaaattataaggaatttaaataagagaaattctaaaaatttaaaaaatccatatttttatcaatatgataaagttgaaaataaacaaccaaatcaaaaattaccaattttaccaacaacacctattgaagataatgtgaataatcaagatttacaaactcaacaacgaatagtggatttgagtgaaacttcatcattttctgaaatttcatcaaatttattaatgcatgatgattcacttcattttgttgatgataaagtaataattcaaaattcatttagtggtttcagtggacgaaatacgaatgtcaatcctgtaaagaattccaagaatcaaaattcaaacaattatgaaaatgaaaataataataataataataataacgataattttgaaaaggatcacgacgaaagtaatgggaatagaactggtaatgatgcaggtgaacctagtgatgatagtaataatactcagggagataaaactaacgataacaacaacactacaaattctggatcaacagataccaccgaatcttcagattccctaaaagatgttaataatactaatagaaacagtactgcatcagtgattaaacaagcacagagaaattcattaggattatttgttgaatttagtcctactaaatccttatcatttactggtttaaataacaggaaaagttataatgaaaaaaataaatcatttcaaaattcaacaagtagacgtgattctgaaattacagttgcaacagagaaattaaattttgaaaaaattgatccaaatgaacgaatatcatcaattaatataagtcaaataaaggcatcaactgaattatcacttggttctataccggatgaaaatgatgatattgaagatgctataataactattaagaatattaatgaacatgatggtaataaggaatcatctgatggtgataaagaaagtagtgataatgattataatgaaccaaaatttaagaaatttaatttgaataatgattcgactgtttcatctgtacatattcctaatgaaacagttccattaccggttaaaacattaaaacagaaacgaaaaccagttccattaccattgaataatgcaactccgaaaattccagctttagatattaacttatccgaggaggaaaactcaataggctatacatcacagggatcaagggaagagttattaaataatgagaaaaaagttcatataaatgataacgaaaatcacagtcataattctgaatacgatgaaaaatattatgaatctaattatagaaccaaatgtagtgattcaattgcaattttattaataattttaagtataattgcaccgccattttggttgatgatatttatgggtaaattagattcaacatttggtaaatttaataaaacttacaaaataattagtctaacaatgttcatcatattcaccattggagcaattattggaatagctgttggatttggatatggtttgactcataagtagtaagtagtaagtagtaagtagcattaattaagtaaattgtataataaacgttccgggtccaatgaggaggcttattcgcgaggttttaaagctgttttagtaggggggggggggggggggggggtgggtaatgggcggagggtattcgggaagataaggagaggtattataatatataatttgtaactttataatacaatcacccctgtttttcaatagaaattgtgcttttctgtatactcaattaataaaacgatatggggaatgtacctgggaaggaatctaatggaaataataatggtaatggtagtatgtcaacagctgcatttacaagagaatttttaggtggtgatggtagtttaaatgggcaaattactggtggattaagatatagtagtagtagaaagggtaaaaattttgaagatccagttgtcaggcaaaggaggaaagagagagagattcagaagaatgaatataggaataaacaaataatgaatttagttgttaaaattaatgaaaatgttgatggaggatatttagctccatatgattgttataaatatgaattagattatgaaactgatattgtacgtgatttaataattaatagggaattatcaccattttttataccattacaagattttaatgaaaattggacaaataatgaattaattaattatattttaaataatattaaattacatgaaaatattaaaccaggagatttagaggataattttgaagatcctaatgaacatagattacatgtatctgcaagttcattaaaacgaaagcaaatcaaaattcaaaaaatgaaaatgaaagagaatgcagctgaattacaaaatactgaaaatattaaatttttaaaagatattaagaataaggaaagagataatgataatgataaatatttacaaataccatcaaatgatttattaattaaattatataaagatagtgaagaatgtccaatttgttttctattttatccaaagtatttaaatattacaacatgttgttcacaaccaatatgtagtgaatgttttgttcaaatgaagagacttgaaccacatttcccacatgatgaagaggataataatagggatgatgaagataaagatccaaatagtttaattagtgaagttgttaaatgtccattttgtgcaattagttcatttggtataacgtatacaccaccaaaggatattagtgttggtattaatggtaaatgtttacctggagagtatattgaaggtaaagataatgatagtaatgagagtaataatgatgataatgataatgaaagtaatgagattacagaattagatatggaagatccatttactaagaagaagataccagctgttaataataataataatagtaataataataataaagagaagaaagataaatctccatcaattataacaattgatcaaattcgaccagattgggaacaaaagttattaagtgcacgtactaagatggcacgtagatcagctgcagcaacagcactgcatgcaacatcccttttacaaggacatagtgggcataatcatagtacaaaccaaagtccgaacaataataataataataataataataataataataataataataatttccgaaataggggtgatagtaatagaaccagtggtagtcaattagaggccatactgattgaggaagcggttaggttatcattactggatgaggaagagcgtaagttacgagaacgagagaaggagagacgtaggaagtaagtaaagagtataataattatgtaataccaagagtcataaaaagaaaagacataatgctaagaagagcgcttaaatttgtaaaattacttattacgaatatgaaaatacttagtgagaaagagaaaataatggtgaaaatttgacagtcgtcatttctgacactgtctttgattgtatttgtgtataacggtttgtattattattattattaggttattaacttgtaaccgtttttgtttctctttctctttctcttctctgtctatatctcttttattaaccacaactggagaaacattatggattctgcgtccatctgggacatttataacacagctactaaactgttacccctatctgaaagaatgaataatagaactgttcgtcaacagtccgctaatattcaacaattaaagaaaaatacattaaataataataatagtagtaataataataatacttctactataatgaacagtttaaataatatcaataatgaagatattatatctatggatttactcactccattaacttcctctccggctacttcaataactaatgctttgaagagtaatcataatagtaataataataataataacaataataataataatgtcaataacaataacaataacagtgataatgatattgataataatactaatattactaataacaataacacttcaaataatactactgacaatattaataataataacaataataacaacacaacttcaaaattaactccaaattcattaactgaaagtccaacatctgctacaataataacttcaaatgatattaagggtccatcatcatcttcaacatcgtcatcttcagctttttcagaattaaataacattaataatcaacttaatttagtaccttcaaatattgataataatacagtatcttcaatagatccaaaaactacttcattatcaaattcttcaaatcatttatattctcctacaaatttaggtatgaatattggtattgatatggatattaatatgaatcaaaattatgcttttgctgatctattagattttaaaaatgaaatgtcaaatgataatgataatgatattacaatgaataatttagattttgatgttttaagagaattacaacaaattaatgattcaacaatgttaaatttaaatcatcttaatcataatatgaataccaataataataataataataatatgagtatgaatgtatctgatgataaagaaattaaaactattaaaccattagatatcaaaatcaaatcagaaacttctgtttctttaaataatcaaaatataatatcaaataatgacacaaaaagtaagagtaccaataataacaataacaataataacacccctaataacaatatgaatgaaatcaaatttgaaaaaatcaaaaaaccttcaactaaatcaaataatattgatataatatcgggtaaaaatattttatcttcaacacctcaacctaatgaattacaaactcaagcaagacaatcaaataaaaatgtttcatcatctgttccaactaaaattgcctcaaagcaaattttaacttgtaataattgtggtacaactaaaactcctctttggagaaaagatcctgatggaaatactctttgtaatgcttgtggtttattcttaaaattacatggtacaatgagaccattatctttgaaaactgatgttattaaaaagagaaattcaaagagacaatcaatgagtgctcaaggtgaaggttataaaaatttatcaacattaacacaaaatcaattgaaaaatcaattacaaaataataataacaatattaacaatattacttctaataattcatcacaaaatttacctgatttgataatagcttcacaatcatatcaatcaccaaaatcttattcattttttcctcaaagtgtaccaaattctcaaactttgaaaaataatagttcaatgtatcaaaatcaaattcagtttaaatcaaatgatcgacatatgaatcaatcatcaaatattccaattgcttctaaaattataaatataacttcaaataattcatcaacctctctctcacatttatcaaattcaaattcatcattatcacgttcgaaaaatgtaccaattttaccaaaaccttcaaaagattcttcatctcctggtactccaagaaattcatttaatgtaaattcatcaatttctcaacctcaagatataccacaatttaagagaagaagatctaaattaaatttatcaacatcacaaaattctcaaccttcatctccttcaactgctgttttattttcaccttcatcatctgttgcatattctccaataaataatataacaaataatcaatcatcatcatatcattcacctgttaataatattaatccaagttcacctgctaatagtttatcaatgtttgggaaatcaaattcaagacataattcaatttcttcagcttcttcatataatttatatcaagatattaatacaaaacgtggattatcaagtaataatattgcacaagtaaatacatataatttaacttcaaatctcacaaatggtataattaatttatcgaataataatatgaattcaccaaatagtccaggttccctacctaatcaatctccaaatggatttttcaataatagtaataatagcagtactgcaacaactaatggaaataatacgatcaataataacaataataatacattcaataataatactaataaatatccaatacagagagaacaaaagatttctaattttagtaatttaagtgcaggtataaatgctatacggaatactagtgcaagatcaagtttgagtaaatgtgttgctaatggtaattcaccatcatcttcaacaaccattaaaaaatctaataaaccaacaccaaaattacaaaatgctgaattaaattcaactgataattctaataacactaatactaattctaataatactaatactactactaatgacaatggtggtgatgaaacaatgactgatttagactggctaaaatttgatatttaatttactaaaagataataatgataataataatatatacacttttcacattttctacatacaactccatttttaattaaaatttcttacttaattaatgtttttctttaataactatacatttttataaatatcgttttctaatcaataatataagtatactaactctacagacctgtatgacattcttagtaaacctcttacataatattttctactttctcgaattttctgtagtaattaatttgaatttgacatgttcaaaattttcaactgttagctacaatatactctttaattagacaatcgacaataatgtattacggtggtcgtggtggatataacaacaataataacaataacaatcgtgccggatataattttccaaatggtccaagaggaggtaataataatatgaatacttttaattcaaatcctaattatgttacagttgaaattcaaggttggaataacgcatcaccacaagaagtaattagctttttaaatcgtaaaactagagttgaattgtttcttggaaatgttgttggtaatatagtacaagcacaagttaaaactatgaaagatgctgatataattgcaagatgttcaggtatgagatttgcaggtcaagcattacattgtcggattgctaataataataacaataataataatcatcataataatagtatgaatggaggtggtaatcctgcagtaaatgcagctgctaaagatagtactattaccatattacgaaattttttaatatcaagatataatcaacaaaataaaatgctagacttacaaagttgtgaaaatgatcaagttttggcaagtaatggattattttcaaattcttcaacatcatctaaattttttcctgcattaatgaaaattgcagaacaagaaaaacttgatgttgaatcagttaatttaagtggtaataatattaatgattattcaaaatggttaagtgatttatcacatagtttcccagatgtcaaaaatattgcaatggcaaataataatgtaaaaaagattgaattctttgataaattgaaaaataaatttaattcattaagagaattaattattcaaggtaatccaatttcacaaaatatgacattagttcaaaaaattgttgaatttttcccaagattagtcataattgatggtaatcaagtaagagatgaacaaaagatcaatcgtattttaacattcccaattaaatcaaccaaagtattttttgaaaatgaagatttttctaaaatttcaactactttcctaacatcatatttaaatttttgggataataatagagtagacttaatgacattatacacaccacaatcacaattttcatatcaatgtgattcgtcagttatttctgattttaatgcaaatacaccaactaatttatggaataattatacaccacattcaagaaatttcaagagagtttcaaatgaaaaatcgagatcaactagattatcaattgggccagaacaaattttaaatacttttaaatgtttaccaaagagtaaacataatttagatactaatcctaatgaatattcaattgaaactgtttcttttccaagtttaaatggtataatgatttcaatacatggagaatttgatgaaattgcacaacctgaacaacaatttgcagaaaattcaaataatgttaataatagatataataagtataataataaaaacaataaaggaggtagtttagaaaaaagatgttttgatagagtttttgttgttgtacctggacctaatggtgcatttattgttgcaagtgatttattatgtgttaaaaactattcaaagaagaagtcatggaatattgttgataataacagtacgaatattaataataatgcagcaattccagctgtacctacaccatcaattacacctgttaacaatggagttccaatgccaccaatgaataattcaacaatcccaaatgcattaccaccagatattgcaagtaaattaaatataacacaacaagaaattgtaatgaaaataatgcaagagacaagattaaaattagaatttgttttaatgctttgtgaacaaagtaattgggattataacacagctggtataaattttacaaacagtaaaacacaaatcccacctgatgcatatttacaatgattgatagttatactgttttgtattgtatataaattttatatgttaaatagatttaacaattatagttataatgattaaattaaaaatgaaaatgaaaatgaaaaggggaaactttaacaataagttttgtacaaaagggttttcttcataaaaagttaagaaactagtcattgcttaatgttcattgctgattatagtaaacaatataaatggtattcagagaaagctgtaaggtattccccaacaattaactatcctgtaaaagaagataatctgattataggtaaggctaaaatgttgatgaatatttataattgtaatttccacaaaaactctgtaaccaatgttaactctgatacagataacagttgggatatttatccattattagaggctgggaagttaataaataaagatgaagttgaactaaaggttcaacttgagaaatgtagtaatgaaagtttttcactttgtagtttttatggtacagattcaagttgtgattctgaatttaaagaagatattaaaagtgatactaatgaaaaaacctttttgtattaattttgtacagtgtaataataaaaagtgataaagtaagataataaaatcagttttgttaaataaatataggagtctataaaagatgagatgtagtaaattaatggacactaattaaaatatgaatcacacataatgttggcaatattaatacctgaaatagttagtattaaccaagtaataacaaataaaatcactggagcaagtagatattcagttttctgtaagaatggtaaagcattataaccataaaatgttattaagaaataataagataatgcaataaaatataatgaattaccaataattgttgaaaaaatattattcattgtaatcaatgggataaagaagaattgaataaaatatagacacaaccatattattaaataagcattacaatgaacatcaaaacaatatgaccattctaaaattgaatcaaatactataaatttatgaataaaatttaagattgaattatttgataatgattcacccattatatgagcatctgattgtaataagaatttattagctaaaatccaaccaattgttgcaataattaaaccaaataggataaaatcgacaattaccatataaagaatcaattttaatatacctaaaacacctgaagtatacattaacccccaaaatattgctgaaattataagtaaaaagcataaaataagtacaaaacttggatcatctcttgaccatttattctttgtttgcttttgataatataatgatttataaacacgttttggactatgtaataaatttaacatttcccaaaatgcagtttcaaaatcaagtgaattaaatattaacatacgtttaaaatatttaggcactttaaatcttgtatttaaattttctcgtattttctttaattgagaacgttttgattgtctttgagcataagttgaaacagatggtattgaaccttgatttgaactaatcattgaaaatctatcattttgagatgaatttgagacattgggtaaatttttaggaatatcatccaaagttaaaggcagtattggattagagtcgtttctcttagacattgtagaagatcagaattaactagttacctatggaatagtaagtaaatcaggataaaataagtaaaatcagataaataaaaccacatgtaaaccattcaaaatggatttcatgcacatcatgtatccaaaaactcaatagaagtggagaaaaacaaaaaatacgaaaagggaaagtgtcgcgggtggaagatagaggtggaaatactgacggatattaaatgaaaattttattttattttataaatacctcattagttatattttgcttattaataattaaaagtggctatgcttatatcttttaaattattttcatttacttttatctctttttcttatcttcttatttccttttaatttactttattctccgtaaatatctttcaaagagtaacaattatggtgcaatttgatttaggtgatctttttcccagtgacagattattaatttcaaattatttacttgatatctataataacaccctatcttctgtagagatactgaaaaagggtaaaaaattagctccattaactcaatgtggttgttatgatggtgaaggttatactttagtatctcatctatctgatccttccccatgtctcttaaatggtatatttatgtcatttttatcaatttattgtattatttcatcttatttaacaataaagaaattaagatcttcgaaaaatatttcaacaaaggcttcaaatatttttatctttaaactgttaatgattgcttgccaaattttcattcaattagctattattatcgtatatgcaagttcaaatcattatgttgttcctggtgtctcaattttccaagattcaatctttttatcatcagttttaacattaatttcaattttcatttgtttcactttatcatatattgaaaattataaaacttatgttgcacaaactccactgattgtattttggttcttttccactattatcggatgtttgagaattgttaattcaattttaagaaattctacatcatttgaaattttcttaattgcttcattcacaatcttatcactcttgattctcattttcgaaattaattttggccctgttttgaacttagatccaacagaaactgttaatatttatgattattcaaatattttcagtagagtatcatttacttggatgactccattaatgcaaaaaggttatgaaaagttccttttacagtcagatttacctccattaccaaattttttgaaaactgatgttttagctaaaaatttagaacaacattggactcaacaaattaacatgtcttcaaatccttcactattgaaggctcttacctcctcatttggtggtccttattttgttgctgcttgttttaaatttattcaagattgtattgcttttatccaacctcaattattgaaaaatctgatcatctttgttaacgattattctcatgatacatctatcccattaactagaggttttatgattgtttctgctatgtttggtttatcagttcttcaaactgctgctttacatcaatattttgaaaaagtttatgatacatcgattaaagttaaatccgctcttacttcagttatttatcaaaaatctttgaaactatcaattgaagctaaaagtaatcaatcaactggtgatattgttaatttaatgtctgttgatactcaaagattacaagatctaattcaaaatttacaacttatttggtctggtcctttccaaattattctttgtttagtttcattatacagtttattaggtaatgctatgtggattggtgttttcattttagttattactgttccactaaatactacagttttcaaacatcaaaaaactttacaaaaatcacaaatgaaagttaaagacgaaagaactggtcttatctcggaaatgctgaataacattaaatccttaaaactttatgcttgggaaaatccttataaagaaaaactgacttatgttagaaatgaaaaggaattgaaaaatttgaagaaaattggtgctttccaagctttaaatcaatttatatttaattctgcacctttccttgttagttgttccacatttggttcattcatcattttatataaagatcaacctttaacaactgatcttgtctttactgctttagcattattcaatttattaggtttcccgttaatgacattaccttggacaattggtaatattattgaatcacaagttgcattagatagattaactaaattcttaattagtgatgagattgaagatgatgttgttaatagatatccacctgtggaaagaaatggtgatattgcagttaaaatcgataatgcagatttcctttggtcaagacaaccttataaaacagctttagttgatattgattacagtgcaaagaaaggtgaattaagttgtattttaggtaaagttggttcaggtaaatccgcattaattcaagccttacttggtggtttacatagaactaagggtaatgctagtgttgcaggtactgttgcttatgttccacaaactgcatggattatgaatggtacaattaaagaaaatattttatttggttgtaaatatgatgaagaattttatcaaaaaactttaagtgcttgtgctttattatctgatcttgaaattttaactgatggtgatgcaactcaagttggtgaaaagggtattagtttatcaggtggtcaaaaggcaagattatcattagctagagctgtttattcaagagctgatatttatcttatggatgatgttttaagtgcagttgatgaacatgttggtaaacatattagtaaaaatgttttaggtccaaatggtttattaaagagtaaatgtaagattttagcaactaatagtatggcagttttaagatattcagatcatatttcacttatggttgatggtagaattgttgaacaaggtacatatgaaagtattaaagttgataacaaaacaccattattgttaaagacagttactgaatatggtcgtaaatcaaattcaaaagattcatctgatagtgcaactactgcagttgatgaaactaatgaaccaaaatcttcaatttcaatggaattgtcaacagaaccttcaagttctgtaactttaatggatgacgttaaaaatgctaaggccgattatccaaaggctgaaatggaagatttcaaaacagatattattaatcaagaaaatattcaagcaaatgctggtagatctgaaaaacatgaacaaggtagtgttagttgggatatttatatgacatatgcaaaagcttgtggttttaaaaatgttatctttttaattagtttaattgttttagcaatggttctttcagttacttcaaatgtttggttaaaatattggtctgaaattaatactagagtaggttcaaatcctgaaccttggaaatatttaggtgtttatttcttattctgtttatctggtgttactgttacagtttgtacatcattagttcaatggttattatgttcaatttctggttccaaatatatgcatgaaattatgttagcatcagttttaagagctccaatgcaattttttgaaacaactccaattggtagaattttaaatagattctcaaatgatatttataagattgatgaaacattatttagagttttctcaatgttctttggtagttcaattagagttatgtttacaatctttgttattatttattcaacatggcaatttgttttctttgttgttccaatgtttttcatttatagatactatcaaagatattatttatatacatcaagagaattaaagagattagaatcagtttcaaaatcaccaatttttgcacatttccaagaaactttgacaggtgtttcaattattaaagcatatgatcaagttgatagatttgaatttttaaaccaatataaaatggatgttaatatgagtgcatatcatccatcagttacagcaaatagatggttagcagttagattagaattattgggatcatttattattttaggttcatcgggtttattaattttaacattaagatcaggtaaagttacaccaggtttggttggtttatcagtttcatatgcactgcaagttacacaagcattaaattggattgttagaatgacagttgatattgaatcaaatattgtttcagttgaaagagttatggaatatgcaagtttaccacatgaagcacctgaaattattgaaaataagagaccatcaactaattggccatttaatggtgaaattgaatttaaaaattactcaactaaatacagacccgaattagaatatgttttaaaagatattaatttatcaattaataaaaaggaaaaaattggtattgttggtagaactggtgcaggtaaatcatcattaacattagcaattttccgtataattgaagcatataatggtaatattgatattgataatgttaatacaagtgaaattggtttatttgatttaagatctaaattatcgattattccacaagattcacaaattttcaaaggtacaattagatccaatttagatccaattgatcaatatgaggatgaagatttatgggcagcattaaaattatcacatttagattcacatgttaagaaaatgtatgaagaatatgaaaataaggaagaaattggatttaatggattaaatgttgcactaagtgaaggtggatctaatttatcagcaggtcaaagacaattgatgtgtttagcaagagcattaatcaaaaagaattgtaaagttttaattttagatgaagcaactgctaatgttgatgttgatactgattcaattgttcaagaaactattagaactgcatttgaagatagaacaattttaacaattgcacatagattgaataccattattgatagtgatagaattattgttcttgaacaaggtagaattaaagagttcgatactcctgctaatttattaaagaagaaagattctctattctatgcattatgttcagaaggtggtttaattgataatgaatagagaaattgtatttccccattataattattataaaacatttaaatttaaaaaaaaaagttactaattaattagtttatcatacattcttttcgtttttttagttatttagataaaagatttatatatccacatatccaaataactattagtatttataaaacttcccagtagtttgtatatgtatttcaatgaatattattgattatatatactatgattatttgttattacgtctcatgaaaaagctggcaataccaactgtagctgcaactgcagaactgattattgcaaaaccaatcaaactatcctttgcaagttcattttctatcatttttttcaattttattgcatttgtattctctggttgatatgttaataatgtatcaatatatcttgtagcttcttgatattctttaattttaaaacatgcaagtgataaataatatatacattcagttctcctacttggcgtcgttttaaatatttctgttattatattaattcctgtcttgacatcatcattatcatttgactttataagcccccaaccataattaaattgactttgagttgttgcaacgggctgttcagattccacttgggcctcaagaatggccaattgttcctcacttaatggaatgaaaccttcctgtggtgatggaaactcgttaaacttcttcatagatgcagacattacttatttgattacttcacagagtgatatcttaacctatcctatccaatccagtccaatttactgataaacagagaaacccctcaaaaggttaaagtaatcaaataatttttttttgttgatgtttcaattttgacggttttttttttattacttgatttgatttaaagtgtcttttcttatcttttgttttcttatctttgatgtattaatttattgtatgtgtttattttgatttgagtttatattcttcttctttcttcaattaacaatgtcttctcttaaaaaacaaccagtgaaacaagcaactagattgatggctgcaaccgcaaactgttcagaactatcaatcgcttatggtaaatgtattgcaagtaagtatcaaaatatgtccaaggatgcttgtttaaaggaattcatcagcttcaaaacctgtgttcaacaacaattagctagaaaggtatgattcaacaaattacatttctttttataatttatttttaatgacatacacttatttcttctacattattcttatggtttggtaatcggggtatattaccaattttattttttactttgagttcgtttccactatatataatatacaaatacacttattataactaatatcttacagtaatcttcgaataatataattgtattaaaataaaacaaaaaatgtttataaatttgttagtataatcaagtataatttacaaaatgttactactgcacgttccaacttcaaacttaattaaacaagagttttaaattctctctttaatctcttaaactttttgttactcttagttcctttcacaaatctcttgattaatttagcaataatatcaaaaaagtacttatcccctaagtataaacttattaaattaacaaaagcaccaacaaataaccacaatttaacttcaaaactcatccatgttaaatccattaaatctccaaaattagaggatggatcaactgtcatcaatccgacagatattgaaagctcaataataatagttataataaatggataattcttagtaacttcctctctatatggtggaccggctgttaaaattaatgcaattaaaatatattgaaaatttgaaaagaaaaataataatgtattatcggtactttgaacttgatcatcagttcctggaattggttcaatataccatgggaaattttgtgatttaacaactttccatgctataaattgtcccagtaaaagtaatacaatattacctaataatggaataataatctttggggatattaaattagctgttggtttcttagtgacaattttatcatatggttttgaccatgacataaaaacagctattggtataattaaaaataaatcaatataaaggaattggaaatctccaagatttgatccttccttgtacaacaaagtaactgaaataaattggattgctgaatataatgacatatattggaaacatgaaaaactagtaactaacgatgatctaccttctttgataatatctaaaacacatgaaatttcaaaaacatgtgatgtaaatggagctgcaactgatgcttcagcttcacttaatgaaacaccgacatctgctgcctttaatgcaccacaatcatttgcaccatcaccgcaaaatccaactgtataatcaattttttgtaactgattgacaagttcatgtttctcatctggtgacattcttgcaaaaattgaacatttcattaaaatcatttcaataaaatattccatatctactaattctgttaaaataaatttgaaaacatcacctgtaattgctaaacaataattatcatcttgatttatatctaatggtgataatgtaactctatctaactgtaaatcaggattatcaacttctgaccaaataataggtggtatatgtgtattgctaaatctgccttcaatttcattaccatctgcatccagataattatctggaaaactttcataatcaaatgttgggataaaaactttagaatttggtttgataatcttacattctctaccaacactaactgctgttaagatattatcacctgtacacataacagttcttaaatctgcatttgttaattgttcaattgtatccgtagtagaatctttcaacttattctcgaaaacaataaaaccgataaattctagatctttttcaatatcatctcttttcaaatcaccaacaaatgataaatcagttggattcttagttggattttttaacttcttagcagcacacgcaatgattctataaccattatgtgtgtaattgtataacaattcattgaagttatcaggaatactatctggtgtacaaatagtttcaataacttctggggcacctttaacaaaaacatttaattcgtcttcatcatagtttgttgtaccagtatttgatttcaaacaaattactgacattcttctcaattgtgaaataaactcaaattctttcagttgaacataataatcagaaacattattctttgtaaataaaatcggttgtgccaatgttaataattttctagaatctaaaaagtttgataatattacactttcatttctatcctcaatcatatcccatccaacaaattcaaacatattttcatctaatggatcaccaactggtttatcgttaattttctttagtgaatgacatgataacattgatgcgaatattttatctgaattaacgactctactattttcaatatcattagatttcttgaacatatcagtaaattcatgaacttttctatcattgattggtttagagatatgaatacccataatatctaatgattcttcagttaatgtaccagttttatcaaaacataaaacatcaagtttaccaccaatattaactctcattggtgcaatacagaaaatcttactttgacgtaatctggtcaatgcaaaattagttccaattgttaaagttgcaggtaatgcagggggaacaacaatagtaattaaatccaatgctcttaagataataactgaccaatccaatcctaatttaataaaattaattgttgaaaatatgaaaccgatacatgcaattcctgtcatgacaccaatatacttgaatgaatcttcgtaaaatttaaatccagatggtttagggaataacattgatctaacaagagcaccttttgtagtattgaatcctgttctcactacaagtgcggttgctggatcattaccattaccatcttcagaaacaccatatctaactctaacaattttagtaccattatataaaaacgattttgaaaatttatttgaaaattttgtatcattaaactcagcttcaatatccttaaccgattctgaagaaattgaaattttagaaactggaacagattcacctgtaagcattgcttcattaacaattgcatcacctgataataaaagagaatcacatgggaaaacagttaatgaaggatcagaaacttcataaatatcacccggaactaaatcatctgaacaaatttctttccaaaatccacttctccaaactctaacatcacattgaaatcttgacatttttctcattctttttaaagcggatcttgtttcaattaatgattcagtgatggagaaaacagatataaggaaaatacagaatgcataataataatagttatctgctaaccataaaaaaattgaaaatatttggaaaacataaaatggatgtaaaatttcatccactaataatttagagattgatttttcaacaatattgattatattatcaccaaaaatcatttttcttagtttataattagtttcagtgataccgtctttaatatcaggataatgacaccacttctcgtcaatccaattagttggcaatttaaataaatcatccagtggatcataaaataatttcatataacgatattcaaatgagattaaaataggaacaatagggtctatatcatcaatagtatatgttttattactcattcctgttcttctactggtatatgatttagtatcaatattgttatcaatattattattattatcagtgttactattattatcgttatttacttcttcatcatccagtgattccacttttttaggtaataagaatgtactcatatttctattataccattttctatcaacagttggcatttctaaaagtccatattcatcttcaacaactaaccattcagccttagctaatggaacttcaacacccattagttttattcgccatcttggaatccatctgaaaattaacgcagctaaaccaaaagttgaaatacataagatatagtataatataagttttgaccaagttgtttgataacctgcaataccaacgactaaatcttcttcagcaatataaaatcgttgatttttattctttgcaggaaattttttaaagaataaatcatgtaatttcagtgattctctctttttcattgttttctcccattcctttttagttatcatatcttcataaccttcataatcttcatcgccttcttcgccgtaaatatgtaaatcttgttcttcatcagctatcaattcacgttctgcatcacctctgaaaaattcactgtaaggattttcatttatactaccataagaattatctgaattattacctgacgcattatcatcattaactaatttagattttgaagttggaaaactttgttgatcataattttcatcaattgaataagcatcactgggataatcatcagcaaatgaattccaatttgtatcataatcaattttaacattctctaaatgattattcattcttgaagatacacccttcgctgattcgatatcttcagttttaaaaaatctaaaattagacctttcatgtaaatcatttgattcagattcatatccatcaaatgctaaattttcatcattttcaaatgatgttaaatcatttaaactttttttatgattaatattttcaaatgtatttattgaatcactatctagaattaattgatcaacatttggagtatcgatattttgactaattaccgaaggtgatcttaaatgactatgatgatgaaatgatgaaattgaacttggaacaacatttgatgcagcccctgaaaacatttcggtattattttcatctaagtgattcaaattattagaattcaaatatctattagttgaactagatctacttgatctacctgacgtcattgaatctctatgtcttgaaataccaatactatgatgttgttgattggattggtaggaggtagaaaccaatgaaggatctgaatgatcgaactcaaaattattattattattatgagatcgtttcggcattgataataatcacacaacttataacaggctttctttagtataattacaatacagtagaatgtcaacaggtataataattccaagataagaaacttccattaatcgataatatataacctgaaatcttttctacagtgtaaaatttttagttattaaccgcggtcatagaatttttatctaaaaaaacagattacagtacaagataagaatcttaatattatatgaacaaatgagttaatagttatatacggagttatagaataaagagagaatgtagggtagtatacaataaacaaaataaaataaaaaaaaatgaaataagaattttcaacatctaaccagtagattaataacaagaaatgaaagtttatctatgaatgaatgtaatctatctctgaatggtataatattaaaattttaactgtgatttgatatatttaaatttgaaaataattccctctaaaccaacacatatgttcaattagaatgtcagcataatctaaatgatgtcattctagcaaaaaaaaatgaaaaaaaaaaagaaaaaatgtaaaaaaaaataaaaaaattggaaaaaatgtaaaccataaaagaaaaaaaacacaaccttgaagtaaaacttgaaaataaaataaagatacccaccttgaataaaaaagtacatgaaataaaagaaatgaattgaatatgaatatgaaaataaaaataattatgagaatgaataatttcagatataataatatatttaaaacaatcattaaaatgaatgaatttcttctcatgtttgaatttaaattagaattaacactgaaatttgcaacaaaaataaagatgaaatgttaatatgaaaatgaatatgaatttaaagttgaataaaaagaaaatttaagcaattatgaagtgaagaaaagcataacagcaatcattaatggtcatgaataatattgagttaccgtccagttattttcttaaaaaagaaggttttggtaatgtaacagccttaggttcagcatggaatgaggaacctgcatatttgaaatcattagtagaacttgaactgtaagatgatgaactcataggttttgatcttgtagtagaagattcagaactagaactagaacttgaacttctagataaaactggaggtctggtattaaaatctggagttgaaccatctggtaatcttggtctattaaatgaaccagtatgaacagaatttgatttttgtaaaggttcggaagagactggagattctgaaatgattaaatttttcaaatcttgagttgaatctctaatttcatctgaaatacttttcaaagtagctctctttgttccaccaaaatcgacttccacacttcttggaggaatgacaattctattgttatctctcttaatgttattattattattattattcttagccttgttgttcttactagtacaagtctttttggaagtactatctttgctattgttgttattattattattagttttctttgaagcactgttattattattgttattattattgttaccctttttagagtttggattttgattttgattactctgttggggttgcttctttatattttgtaaaggctttggttgtctttgagtttttgtttgtttttttgaaggattagatttattattagatttagatgaatcaaaattctgtttattcattttagaagacatttgtccatgagacattggaatagcatgtatagattctgcaaccatcatcatagtaaatgtgatattagtcttgtaagatgtttagtagttattaaagtgtaaggtagtccttgcagaagaagagataagaagataagaagaataaaggaaagaagaagtagagataaagaaataggaaaagaaattgactcgtatatataccttaatactaatactaattaaaaaaattggattttgccactatattgagaatcgcaaaagattatgatgacccattttctgtgattatgcgacactgtgtttgttgtatggtttgcttcttttcgtactattggttgtttattgtatgagtaatggaaggtattgttattttgatacatgtagaattggctgtattgtctgtgggataagtttaacactgattactaagctttccagtagtaaaatttatgaaattgtaaataatcttaaggaaggacaacaattttttaaaaaattttaacactaaaacaaccattacaaaagtaaaaactcctttttttaacttttaaacactatagactgctatatatgtctcaaagattaaaccgattcattaatacaagttatccatacacaaatacacaacaaataacacaaatacaacaagcatcgatattcaataaagagcctacagtgggatgagccacccctatcaaaataagatgaaaaaaaataacattacgtaataatattcatttgaaattttttttctttctacaatctctaagaaaaaaaaaatttatcaaatttaatttgatttatttcagctatttaactgccactgtaaatagaaaagcaatcaacaatggattcccaacaatctaataaatctcatagagggagttccaggaaaagtactgctaagcaaaagttacattctcaaggtaagaatgttaaagcttttgcttttgcaaaacctggtaaattacaacgtcaagcaacaagaagtagtgatttaggtgaaaaaagatttcatgttccaatggttgatcgtacacctgaggatgatccccctcctgtcattgttgcagttgttggtcctccaggtactggtaaaactacccttattagatcattaattcgtcgtttaagtaaaacaactataagtgatattaaaggtccaattacagtcgttagtggtaaaagaagaagattaacatttattgaatgttcaaatgatcttaattcaatgattgatattgctaaaattgcagatttagtcttacttttaatggatggtaattttggttttgaaatggaaacaatggaatttttaaatattgctcaacatcatggtatgccaagagttttaggtattacaactcatttagatttatttaaaaaacctgcaactatgagagctgcaaagaaaaaattaaaacaaagattttggactgaagtttatcaaggtgcaaaattattttatttatcaggtgttataaatggtagataccctgatagagaaattttaaatttatcaagatttatatcagttatgaaatttagacctttgaaatggagaaatgaacatccttatttattagctgatagattagtcgatttaactcatccttctaaaattgaacaaaatttaaaatgtgatagaaaagttgctctttatggttatctacatggtactccattagcaaatgaaaatgcaagagttcatttagctggtgttggtgattttactgtttcttcagtggaaaaaatacctgatccttgtccaactccttattttgaacaaaaattagaggatttcgaaagagaacaaagaaaaattgctgaagcaaatggtgaagaaattcctgttaaaactcatagacgtagaaagagattagaagataaacaaaaaatcatttatgctccaatgtctgatgttcatggtgttttaattgataaagatgcagtttatgtcaatgttggtcaaaaagcttttaaatccgaagaagatatgggtggtattggtgaaaaattagttgctgatttgcaaaatgctgctgatgtcttagattcaagaaaatcctctggtttgaaattattcagcgatggtcctgaaattaaagctgttaatggtcaatttaatcatgatgaagatgaagatgatgaagaagaagaaattgttgctgaaggtgatgaagagtttgaaggtaatactggtagacatcaattaagaaatgcaagaatacataaacaagctatctctgaaatcaatgaagatgatggagatgatgaagatcttgaagaagatcattttgatgaagatgcagatgatagagcaagagaattaaaacttaaacaattaaagaaaacttccaaaacttcaacagaagaaaagttacaatttgaaactgattcagaattagaggatgaagatgattatgaagaaaatgataaaagttctaaatggcaacttatgggtggtaaattaaataatattcaagttaagaaaacttgggatataaataaattaatttacatgaataatatcgaaccaaaagatgttatatcaagatggagacaagaagatgatttagatgaagaaaatatggaaccatcagatgaagacgaagaagaagatttcttcaccaaaaaggaagagaaaaatatccaagaagttaatgataaggctaaattatcattagaacaattgaaggaaaaatggtcatctgatagtaattcattattaaaattaaagaaaagatttttcctatctgctaaacaaagaattcaattagaaaaagatgcagcagcaggaaaaatcagtgaaaatggtgatgatgatgaagtttttggagattttgaagatctagaaaatgaagatggtgaagatggcgaaggaaatgatgaagatgctgatgatggagaggaatctgacaaggatgatttcactaattttgaagaagaagagatgaaggatgaaatgggaattggtaccgaagttgatgaagattccgatgatgaagaagatactggtgatttaagtgttgataaacagagagctttaaatgcaaagaagaaggagaaattaaaacaacaatttgaagaagaagaagaatataagggagatgatgatccatttaatgaacatgataattggtatgaattccaaaaagcaaagatggcaaaacaattagaaattaataaagcagaattgagtaaacttgatgaagaagcacgtaaaaagattgaaggttatcaagctggtgcatatgttaaaataacatttgattcattaccaatggagtttgttgaaaattttgatccaacattcccaattattgttggtggtttattgagtaccgaagaaagatttggttttatgaatggtagaattagaagacatagatggcataaaaagattcttaaatctaatgatccattaattttatcattaggttggagaagatttcaaacattaccaatttataccacatctgattcaagaacaagaaatagaatgcttaaatatacaccagaacattcatattgttttacaacattttatggtccgttagtcgcaccaaatactacattttgtggtattcaagttgttgataaagatcatacaactggatcttttagaattgcagctacaggtgttgttgaagatttaaatgctgaaagtacaattgtcaagaaattaaaattagttggttatccagcaaaaattttccgtaatacagcatttattaaagatatgtttacatcagctatggaagttgctaaatttgaaggtgcatcaattaagacagtttcaggtattagaggtgaaattaaacgtgcattatcaagtcctgaaggtcattttagagcaacatttgaagatagaattttaatgagtgatattatttcattaagaacatggtatcctgttaaaccaaagaaattttataatcctgttacatcattattattaaaggataaagataattggaaaggtatgagattaactggtgaagttagagcagttaatggagttgcaacaccaagtgagaaagattctaattataagaagattgaaagacaagaaagaaaattccatgatttgaaagttccaacatcaattaaaaagaatttaccatttaaatcacaaattcaagaattaaagaaacaaaagaagaagacctatgttcaaaagagagcagttgttatggatagtgaagaaaagaaggctagaaaattaattcaaactattcaaactattaagaatgataaggaaagtatgagaagagctaagaaaacttcaaagatggaagaaaagattaaagctcgtgaaaaggttgaacaatttaaattggagagaacaaaggaaaagaagaaggaatattttgaaactcatggtaaaaaacgtaagttacaatcaagtgaaggatcaagttcagcatttggtagtaaaagaagatagatggtgtctttaataaagctttattataaacttgtatgattaagtttctatttctataatattttatatagacaaaacattgttattattactattaaaattatatttgcggaaatgtttagttataatataaaaatacataaaaaactattaatctgtcataatatacgaattgagttataggtaatgattagatgaattgggataaccatttaaaaccttcagcataaccttgtctcataacaatagaacacatgaataattctaaaggtctaacaccagctgggacactaccaactctaccagtagtttgtaataaacctaaataatttctaacttcattttcactaacagctctcggagaatcgattttattacctaagataaggaaaggaacagattttaattcttgcatatttaataaagcatctaattctaattttgattcttcgaatctttcaggatctgcaacatcaactaaatatacgataccattaacttcagggaaataatctttccataatcttctagcttgttgatgaccacctaaatcaaaagttgtgaatctaacattaccaattgataattcttcagatgttggatgtaaagttggttgtaaagttgccattctatcatttttcaacatatgtaaaagggttgtcttacctgcattatctaatccaagaaataataatttagcatgtttattccataaacctaaatatgcaagagcgtcttgaaaccagtcaaaaatccacattttaatcagttacttataggatgattatagatatacaatttcaataaaataaagcaatccccttccttatattttgccattggaagaatcatgctctcactttaatgttcaaaatcacccattcaaaatttaaatattataataccaccatccgtcccatcgaccgcatctttttcatttttttaaagtcgctcctctcgcccaaaggcgacatgtgtctttctttaaattctttgtttgtttgaatcagtgttgctggtgaaggcactgtgtatatgctcagctttagatatctctgattatttctctgtttccattgatcttcatctcatttaatatcaccatatgaaacttaacatcaaggtatgtaccatatagttacattgtcacattttttccaatctttaatgatcattgaaatactaacatttccatatttcctattttttttgatttctattattatcacagcaagtattaacttcgagatcagatcgtgtaaagggaattgatttccatccaactgaaccttgggttttaacaactttatatagtggtaaagttgaaatttggtcatatgattccaaaactttagttaaatcaatcgatgttacaaatgtacctgttagagcaggtaaatttattgctcgtaaaaattggattgttgtaggtgctgatgatttccaaattagaatttataattataatacaggtgaaaaagttgctcaatttgaagctcatcctgattatattagatcaattgcagttcatccttcaaaaccttatattttaacttcatctgatgattatacaattaaattatggaattgggaaaataattggaaattagaacaagtttttgaaggtcatcaacattatgttatgtcaatttcctttaatccaaaggatactaatacttttgcatctgcttgtttagataaaactgttaaaatttggtcattaggttcaagtgtacctaattttactttaaatgctcctgaatcaaaaggttttaattatgttgattattatcctcatggagataaaccttatttattaacttcatccgatgataaatcaattaaaatttgggattatcaaactaaatcttgtgttgcttcacttgatggtcatatatcaaatgtttcatttgctgttttccattcagaattacctttaattatttcaggttctgaagattcaactataaaaatttggaatagtaatacttataaattagagaaaactcttaattatagattagaaagagcttggtgtatctcaacaaagaaaaattcttcattagttgcaattggttttgatgcaggtaatgttattattcaattaggtgatgataaacctttattatcaatggatcaatcaggtaaaattatatattgtaaacataatgaagtttatcattcagttattaaaaattcagattctaaagctcaagatggtgaaattttaagtttatctaaaaaggaatttggttcagttgaagttttcccaaattctttaaatcattcaccaaatggtagatttgtttcagttacaggtgatgatgaatatattatctatacttcattagcttggagaaataaaatttatggtcaagcattagattttgtttggggccaagattcaaattattatgcaattagagaatcaaaatcaattattaaaatctttaaaaattttaatgaaaaaccaaatggtcaaatcaatttaatttatgaagctgataaaatatttggtggttcattattagcagtcaaatcaaacgattcattatcattttacgactgggaatctggttcaattgttagaacaatttctgtcgatgcagaaaatgtttattggaatgatgatggtgatttagttttgatttcttcaaatgattcagtttatgcgttatcttttaatagagaaattttccaagatcatttatcaaatgattcaattgaccctgaagaaggtgttgaagaatcatttgatgttgcatatgaagttgatgatcaaattttaacaggtaaatggataggtaacgttttcatttatacatcaaattcaaatagattaaattatttagttggtggatcaatctataatttagcacattttgataaatcaatgtttttattaggttatttatcaagagataataaagtttatgtttcagataaagattttaatgtttcatcatattatttatcattatcagttttagaatatcaaacagttgtaatgagaggtgatttagaacttgcagattcaatattaaaaaaaattgatgaaagagatataaataaaattgcaagatttttagaagaacaaggttatactgaaaaggcattagaaatttctaatgataatgatcaaaaatttgatttagcaattcaatcattacaattagaattagcattaaatattgctaaaaaggataatagtcttcataaatggaaaaaattaggtgatacagcattaaataattggaaatttgatttagcaattgaatcatttgagaatagtaaagattatcaatcattattattattatatacatcatttaataatattgaaggattgaagaaattaagtcaatcatgtatagaaacaggtaaatataattcagcatttgctgcatcatgggctgcaaaagatttaaatacatgtattgaaattttaaagaaaacaaatagatttacagaagcatcatttttcagtataatttataatagagatattaagaaagttgatgaaattacaaaactttggaaggataatttaagtttagaagataacggtaaagttagcgatagaattttattaccaagtgtaaatcctgaatcattcccaacattaaaggaaattaatgattcactcattgatattgaaactacagaagaaatacctgaagaagaatctgctgatgtcgtaaaaaaagacgatgaagaagaagaagaaaaatttgaggaagctgaagaagcaaatataatagagtctaatgaaacggctcatgaaggtaccgaggaatcaccggtagaagaggtcaacgaagtcgatgatgatgaataaataaaagagttcaaaataacaagaataaccctctaacgtttaaatttgtaacctttaacttaattatcatttaataactgttttataatattttaaatctacaatatcaccatatcggtatatattttacagacattactattagttacgttataaaaaaaaaagtttattcacataatatcgataatattctttcaaattgtaacgctatgcatgagaaatccttaaattttcatcgcaccaccaataatttactaaccagtatggtggaaaattatcaactccgaaaccatgttggttacgattttaaattaattcccccctattttattcattattttgacgtactacgttaattattattattttaactgtcaaacaattaatttatctaaattaccgtattattcatagaaatattttcaccctgcatctatttcttgaaataactataaaagatgtgattatcctcttattttgctaccatttctaatttacttattttatatttcttttgctttattttctttattcagacaaagaaaaaacagttaactaattatcaaatatgcctgattggtcacaattcccagatccagataatgtttcattaactaatgaggatgtcccagattttttcaaaatctgtgttattcaaggtgtcgcagatgcaggtgcatcattcactggtggtacagctactagaattggttcaattttcgttatttttgttgtttcaacatttgttacagttttaccattattaacacaaagatttaattggaaactatcaaaatggttttatttatttgctaaatttttcggtgcaggtgttattttagcaactgcttttgttcatttaatggatcctgcttatggtgaaattggtggtgatacttgtgttggtatgactggtaattgggcaagttactcatgggttcctgcattaattttagcttcaatttccgttactttcttaactgaattattctcagaagtttgggtcgaacgtaaatatggttatgttcctgaagaacctgatgttcaaaaacttttaactgaaaaaataaatgaaattaataacgataatgataattctgaagagaatgatggtgctgtttctgatttaaataaaaatgatgaatttgctgttgatcaaaaatctttaacttctgaactttctagatatgaatttaaaacacaattttctgctttccttatcttagaatttggtgttatcttccactctgttattattggtttaaatttaggttcaactgattatgatgaatttaaaactttatatattgtcttagttttccatcaatcatttgaaggtttaggtattggtgctagattatctgcaattccatggccaaaggataaacctgaatttttgaaatatttattatgttttgcttatggtattgtcactccaatctcaattgcaattggtattggtgtcagaactacttatgcatcaaattcttttactgctaatattgtctctggtgttttagattctttatcttcaggtattttaatttatacttcattagttgaatttattgcaagagattttatcttcaataaagaaatcaaaacaaaaacaactgatttaatgttcagtttagtcagtttatttcttggtgctggtattatggcattagttggtaaatgggcttaatcttgcctacaatatttttatatacaaaacactttttttataatcaactctccccctttttacacgttttaactatatttagttaattaattaatctaatttaatatttaatatttcactaattcatcaaaatgtctctatattgattatttatcttaaaaaaaagaaagaagttaaataattaaatttttaaatattatctaatttgcaaataacctaactttatcaatttcataatctcttttatgtaaagccacaaaataacattctcttgattctaatctacatgcctttggtttaaatctatgaacttttttgaaaacttttaataatcgtttctctaataatttatcttcttcaccagtgaaaaatttaacaacaaatgaaccattctttttaagtaaatcaatcgcagtaattaaagcagcatcacaaagatccattgacattgtatgatctttaaatgctaaacctgttgtgtttgccatcctaaaatatggattgttagtagtcttacttcgaaatgcgatagctggttgaataaatggtacatacatgtcacttaacacaacatcgacagggtatttattttctattttatcattatcattaatatcattaggattttcattttcattatcattatcaatattgtcattaatatttaattttttagttaataaactaagttccgcctctttttcaataattgaaacatctgaattaattaaagttttatcacttgtatcattatttgaaactatttcaacatcatcaaatattttattctttttttcaagagctgataatttaaagaaatttttaatttgtaaatgagtacctttacttaaaatattaccttgtaaggcagaagcaccatttggtggttgataaggtaatatatcaacacctaaaattttagaattttttgaacatctctctaatgcaacttgattccaagcaccaggagcagcacctaaatctaaaacatttaatgatttaccattatttgaagatttattgaaaatatgaaatttttcatcaatttgtaataatttaaaagcagctcttgattttaaattttcagcctttgctctacgagtataaaaatcactattttgtctattaagccaacgatttgatgatgatgaatttgataatagtgaaattgatgttgaaaaatttctaatattcattaatatagatgatttaagtacattaatatgtcgactcattggtggtatatgattgtattatgatgataaaattgaataagtactactgaagtgttatgttacgtgttattgggtataaattctatacttattgataataaaccagagattgtttacctgtaattttgatgtgttaagattgtctcatgtaatgaaaataaatgaataaaattggtaccaagcctccaaaccacgtgcaacaaaagaggtctaaaaaagtgagaaaaaccctcacacagagaaggagaatttttctccaattttcaaattttattttcttacagtgcgaatatctcttactatcttactattagagtgatagatagacagtatctttacaggaaaacttttcaattaatttatcatttttgtttgattttttacttctcttcttttagtatcgtcgaaaaaacctttaccggattacctattctagggagactatcatatattaattaatcatgtctaagattaacactactcaagttagagaaaacgtccaaaatttattaaaatactccaacgaaactaagaagagaaacttcttagaaactgttgaattacaagttggtttaaagaactatgatcctcaaagagataagcgtttctctggtactttaagattaccaaatgttccaagaccaaacatgaccatctgtatttttggtgatgcttttgatgttgatagagcaaagggtttaggttgtgatgctatgtcagttgatgatttaaagaaattaaacaagaacaagaaattaattaaaaaattagcaaagaaatataacgctttcattgcttctgaaactttaattaaacaagttccaagattattaggtcctcaattatctaaagctggtaagttcccaactccagtttctcactctgatgatttatacgcaaaggttactgatcaaagatctaccattaaattccaattaaagaaggtcttatgtttagcagttgctgttggtcacgttgaaatggaagaagatgttttagtttcccaaattatgatgtcaattaacttcttagtttctttattaaagaagaactggcaaaacgttggttccttagttattaaatcttctatgggtccagctttcagattatactaaacgccttgacagtttcattcattacatttttataagttatatcaaatttatataagtaatttaagtttcagtgtttattataaaacatatccgtattgtaaaaaaaataaaggtgttcttataaaattatttttattttcatgaaagtttacaatttcccttatttactatcacaatttcatcctgtaagcaatgagatattatggaatataatactattaacttagactctgatgatgaaccacaattcataaacacaacttctaaggaaccccaaagagtatctgaaacaattgaaatattgtccgataatacaacagatttaagtgatgtagatgatgaagtatttaatgttcaaatacccaataaaactataaaccccgtattaaataatgatacaaatactaaccaaatcaaattagataatacaattgatgaacctgaattaacaccacaacaattgatgcgtaagaaactggcagaagcagcagaaagaagattgaaacctacatctaacgatcatcaaccaactcatgaagtaaatgatgaaccgattaaacaagaaaaacgtaaagaatacaatgaattagaagatagagacgaagatgatatggtattgctcaacgatacaacgccaaatattaaaagagttcaaacaaaacctataaaacgagttgaatcattcacaattgatgatgatgatgatggagatgatatcaattgggaagataatccaataattcaaccacccccaaataaaaacacatacatgccaaataaaagcacacaaagcacacaaacacataacaaaaataacttactcaatacaagtaaagctgacaacacttcaagaatacgaatgattgcaaatcctacatactgtaaggaatttaaagttaatggagatgttgatgcagtttcattaaatgatttagtgggttcaaaaggattaattaaaacatatcaatttaatatgttaattgattttgattatcttgcaagttttgttaataataaaaattgtgaatatgttttgatttgcaaaaatgatggagatcatttacatattcaaccttcatcatataataattataatgttaaagttattgatgttactgaaaatttacctaaatttggaactcaccataccaaaatgatggttaatttttatgatgataaaacatgtcaaattgttgttcatacaatgaatatgacacaagctgatcatttaattcaaactcaaatgtgttgggtatcacctgttttgaaaatgcatactgatcgaaaaaaatatttagatttcaatactagcaatatatcaataaagaaagatacaggcacagtttttaaaagagatttcattgcatatttattaacttataaaaaagaaggtgttaatgatctaattaatgaaattggtaaatatgattttacaccaattgatgttgtatttgttgcgtcatccccaggtaattatcattatgaaaattgggaaacattaacaagagttaatgcaaagccaatgtttggatatggtagattatggcaagtaattcatacattaggattacaatgtttacatgggaaatttattggacaagcatcaacaattgcaggaccatgtgatagttggaaacgtaatttatttgtttatttattaacatcatgtgttgaaaaaggtttcccattaattaaaaaagctgattattcatttgaaccatatatgagaacaatgaataaagttgaaccaatacttatatggccaacaattgatgaagttttaaaatctagatcaagtatgtattcaggaattgcattacatctgaaaacagttgataaatgggaagcatatgagagacaatatcttgatataaggaaatatttacataaatggacaactaatagtgatattccatataagagtaaagcaggtagatcgaatttatcatcacatactaaaacatatacagttacagaagataattttaaaacacttaaatggtttttattatcatctgccaatatatcacatcaagcatgggggaaatttaagaaatataatttaattgattatgatatatcatcatttgaggcaggtatttttgttgcacctgaacttttgaatgtaccaagtaatgttaataatcacagacaaattttagtaccaacttatggtaaggatgatgcaaatgatgttaattttttaagtaatgatgataaatttaaaattggtttaagattaccatatgatacaccattagttaaatattctgcaaatgaaaatccatgggcacaaccagaaacttctaaatatatacagtaagtactttattttactaattagttattttatttataaaatctagaacgtaaatatacataatgatggatagacataagaacattatctcattgcttgtgttttaacagtagttgtaccagcactgaaacatgaattacaacaaaccatacagagaccacagaaaagagtgtttatagctggcagatctaagacatcatacatgttatttgaacagaaatattcatgacattcacttttatctctttgactttgagttgcacgattggcctgtgcagctttaatcttttcttctcttgtaacatatgctttcggtggctccttatcctttggttgttcagtttttatatcttccgtaatagtaacttctttcttatcatcactatcaccatcaccactctctagtttaacttcttctaattcaggagttgcttgcttagatttagttggaatgttttttatatttgaagtagaagtttttaattcttttgcatcagtatatacggaacctccagcattagtaatttctgaactagcatcttgaaattgtgaggaacctgttgtgctgaaagatgaaattgaatttgatcttgctactgacattgtataaagactatattatgaaaaacgaatgtgataagtaaaagatgagataactggtagttaaaactgataacgatgttcaaactgaaccagcagttgttactttcaaagtaaatccaaaggaaaaaaatagaaactgttgataacacttgtaattcaataataaagaatcatgtcagaaattttgacgcaatgaaaacgtaattttactatgatgactacttatccctacttattacttagattattaatagagtgttttatatacagtgtttgttcttcaattgttgtaagtatatctgcatgtacacgataatgtagtatctctgagtataacacactctattatagaagtaaccccccctataaccttattatatacactttccatagtgtgacaaatccccatgtaaattatccaaggctgtgtatggtagatttcaacatgaaaaattttttatctgcaaaaagtttctttactaatctagaataggtatgttcttcctgtataatactcaataaatcaagtaaactatgcctcctaaagttgaaactagaaaatggaaacctcctaagggtccaaagaatacccctcataaaaataaaaataccattggtttaggtagaactattaaaaatgcaaagcaaagtcaaaatcaagtttattatttacctgatggtcaaatgagatttacaactgaaaaacatgaagctgactgggttaaattaagatccgtcactcaagaaaatgcattagatgaattcttaaatactgctcaattagctgataccgattttacagctgaaaaacattcaagtgttaaaattattagaattaataatcaagctgttgatacaggtaattataatccttatttattaacttcagatgaagaagctaaaaaatttaaacttcaaaaggaacatattaaagatttaattgttccaagaagaccaaaatgggatgaaaatacaactaaatatgaattagagagattggagagtgatgcattcttagattggagaaaaaaattagcaatcttacaagaagatcatgatttattattaactccttttgaaagaaatattatggtttggaaacaattatggagagttgttgaaagatcggatttaattgttcaaattgtcgatgctaggaatccacttttatttagatcaacagatttagaaaaatatgttaaagaattaaatcctttaaagagaaacttattattagttaataaagcagatttattaacttatcaacaaagattagcttgggctgtttattttaaggaacatggtattaaatatactttcttcagtgctgctaaggcaaatgaaattttagaaaaacaaaaggaagaagaagaagaacttaaaagatatgctgatgaacataatggtgaattaccaccagtatataatcctaatggaaatcaaaatcaaaatgaagacgatgaagattatagtgatgatgaggatctagatgttgatatatccaatttaacagaggaacaaaagaaagagtatatgaaacttcaaaaggaacttgaagaattagaaggccaagtggatgatttagatatcgaggatgaacttgatgatgaatttgatgatgaagatgatctagcaagattagaacgtgaattaaaagaagaattagaagaagaatttgatgatgatgaagattatttcgatgataaagaagattatgaaggattagatgatgatattagagaaatgacacgtattattacagttgaagagttagaagatttattcttaagagttgcaccagaaccattaactgaagcaccaccaggacaaccaagtagaattcaaatcggtttagttggttatccaaatgttggtaaatcttcaacaattaatgcattagttggttctaagaaagtttcagtttcttcaacacctggtaaaacaaaacattttcaaactattttgttatctgataaagttatattatgtgattgtcccggtttagttttcccaaattttgcatatacaaatggtgaattagtttgtaatggtgttttaccaattgatcaattaagagaatatactggaccttgtcaattagtttgtcaaagaatacctaaatatttcattgaagcagtttatggtattacaatacctgttttatctaaaactgaaggtggtacaggtattccaactccacaagaattattaacagcatatgcaagagcaagaggttatatgacgcaaggttttggttcagctgatgaaagtagagctgcaagatatgttttaaaagatttagttaatggtaaattattatatgttgaaccaccacctcatgaagatggttcaaaggcatctgatgatgaatgtttgaaatttaatcatgaattatatacaatttcacatttaccagaacaaagaaggatacaattaattagagcaattaaggctaaaaatttatcagttaaagaatttgatttatcaaaagatttagataaattaacattctcaggacatttatcaactgatgatgaaaatagtaaacatcgttcaagaacttatggtggtaaacaagctgcattatatagtgctgcaaatgaattagatgatgaatttttcaatatgactcaagttagaggtaaccttcgtggaccattttatcaacaaaaagttaatggtggttcaggtaagaagcataataaagcatataaaactaagggtaagagaaagtaagggctcataactatataatctatattctgtatcataacgtataacataacaacatttcatatataaatatattacaatttttttgctaaatagtaaatgtttcatcacctaattctaaattaagttgattaatctctttttcaatatcttcaagattaatatctaatgtttttaaatcatcaaatcttctttgctttttgaaagtttcatacatttcagtaactaagaatttttgttcatttaatactatcaatttatctctcttttcacgtaattcacgttttgataattttggtctatcatttataatattttgtaatttttgtctttccttctctaatttaacattttgtgatttccttaatataggcaaattgattttgataaattttataataacgttctttaaattagtcaaaattctaatttcatcatttttacaattacctttattgataaataaatcaatatctttaattaatttatccaacttattaaaataattaacatacagtttattttctaagtcatccttgataaatgataaatcctctgactctaattttttagaaattaatttccaaatattgaaaaacttaaccatttcatcatcaaattgttgtttatctaacaggaaaacttttttattcaaaacacgtcttttacattctttacaaatccttaaaccaaatttatccttctttaaaagatttcgtattctatccctttcttgaattgatatatctttatcgactataagcagttcaaataacatacctaatggtacaatcattgaacaacctttttgtaaatctccacaaactgattcaccacaaattctacaatgatgtcttctatttaaccaagtgaaagtatttaaacaacattgacaatttccctgattattccaattaaccaatgatttttcaaaattaataaatgattcttcatttatgacattatttaacatccaattaaatactttatctaatcttctatcaagtaataaatttttcaatgattcattaattaatcttttatttcttaattctttaaattcatcagttaaattattaattggtgatataatatttggtaatttattaatacaatcaatacaacaatcacaccaaataccatttttatcaaattctaataaactattaactttaccacgattaatatgatttgaacaaaatgttaatccacatatacaacaattagtaattgaactattattacatttatgacatttatttgatttaatataatgatttctaggtattgattgtctttgatttaaatgttgtgaatctatatgattatttaattttatcaatgatgacattggtatattacaaattggacattgaattgattgtggtggcggtgagggtattgttgaagatggtgtagataccgaaggtgatggagtatcgggcactggttttgacttccctaatatacgtggtttcatttatctaattgattgatatatataaagatgcattaaaagaagatcgtacgtatctgtttaataatatgattaaagaaaaaaatatattttacaaaataataatataattagttagttaattaaaaatagttaagttaatgattttgaggatttaataattcctctatcgtataataagaatcatatgataatgatttccaagagggtacaagtttatcaattaaagttggatcaacacttaattcacgttttgtaaaatttgttaattcaggtacattaaatgattcaattaaattataatttctaaaatttggtaatttaccattttggaaattttcatttcttaattcattaaaataatccattgacattgcatcaattgcacttattctctttattggagaatattgaaaaatatttataaataattgttgcatttcaattgaaatatttgggaaaattttcattattggaattgatttaattgaaggaaatttatgatctttataatttggattcatatcattaatttgatcttttgaaggtgtacctaataattttatgatttcaactaattgatcaatacctgattgaccagggaataaaggttgacctaaaaccatttcagctattacacaaccagctgaccaaatatcaatttttggtgtataatttctagcaccaaatattaattctggagctctataatatcttgaacatatatatgaaacatttggttctgttggttttaagattttagcactaccaaaatcacataattttaaaatacctcttattggatcaattaataaattttgtggtttgatatccctatgacaaatacctaatgaatgaatataatttagagatcgaaataattgataagaatataatttaattgctaaatcaggcatatgaattttacgagagaaataccaatgagttgaagtatataaagtttcaggaacatattctaaaattaaattaagatataattcatccttttcatttgatttataaaaataagctaataaattaacaatattttgatgattaattattttcattgtctctaattctctatttttgaatcttttatcttgtaaaactgatttaattgctgccttttcattatttggtaataaattaattaaataaacaaatccaaatgaaccatgacctaccatactttgttgagtaaatgataaatttttttcctcatttgattttatatcaaatacaaattctgtacgtgttagtgtagagttgggtgaggtgttattagacgatccaattgatcctgttgacattgtgttgtgttgtattgtatattgaatactttactttactttcccctaaagaaatgacatgacactttgatatatgactgtgtactaagagatatttctcctattattaaataatttgaaatcgcggagtgatgcactatgttttattattattattaggattatgaatactattatgactatgattataattataattataattataataaataaataactttagataataataatattatataatatattagatgaatatgaatagaattaattatatttagaaattaactggtttatcaaagactgccattgcagcttccttgaaagcttcagataaggttggatgtgcatgacaagttctgtaaatatcttcacatgatgcaccatattcaattgctaaacctgcctctgcaatcatttcaccagcatttggaccaattatatgaacacctaaaactctttgagtttctgcatctgcaataaatttaacaaaaccttcagtatccatattagtctttgctctagaatttgcaataaatgggaatttaccagttttatatttaataccagcttcctttaattcttcttcatttttaccaacccatgcaacttcaggatgtgaatacataacagctggaatatttgcataattaacatgaccatgaccagttttaatatattcaacagctgcaataccttcttcttcagctttatgagctaacattggaccaaatgtaacatcaccaatacattgaatatgagaaaatttagttttatattcactatcaatgacaactctatttctcttatcaaaatctaaaccaattttttcagcattaagatttgatgaatatggtcttctaccaactgcaactaaaagtacatcagcttgaattttttcaattttaccagatttagtatcttcaaattcaatatcaacttcaccattagaatttttaacagctgagacaactttagcacctaattgaaatttaagaccttgctttgataagaatttttgagttgcctttgaaacttctgcatccatacctgcaccaccaattgccttttgaaattctaagacagtaacttcagaacctaatcttgaccaaactgaacccatttctaaaccaataataccaccaccaataattgctaatctttttggaatttcctttaatgaaagagcaccagttgaatcaacaattttttcttgatcaatttcaatacctgggaatggtgaaggttcagaacctgttgcaataataatattattagcagttaaaattgaatcctctgaaccatcaattggatcaactttaacttgatgttcatcaacaaatgaaccattacctttataataagtaacaccattttttttaaataacatttcaataccaccagttaattgtttaacagcagtttcctttgccttcattaaattacctaaatttggtttaacatcaccagagatatcaatacctctctttgaagcttcatgtttaacttgatggaaaagatgagaattatttaataaagcttttgaaggaatacaaccaacattaagacaagtaccacctaatgcacctctcttttcaatacaagcggtattaaaacctaattgagcagctttaattgcagcgacataaccacctggaccaccaccaatgacaacaacgtcatgtttagcagtttttgtagcattacgagcagtagtagagaatgatctaagcatgttttcctttaccaattagaacccaattctaaatcacaagagaaataactgaacattataacagactcttcagtaaaatatttttaattaattaactacataccccactatacaagtaaatatttcggacgcgaactcggatcttagaagtccttcatgttcaaccactgctgcactctctctgtgaactcttgtggtttctctcccataacccaatggccacattggatatcttccatagtgaaggatgggaagtatttaccaatagtaggaatcatttcatcacttatatatggactctctgtacctctaataaataatgtaggtccattatatctaacattctcatatggccattctccaactgcatcaataccccttcttaatatattaataggtaatctacatttataatatttatcactaccactactaccatcctctgattcatttggtttcatattagtaagtaaaaattgtctaactgccttatttttctcaaatttacttaaatattcatcacattcctttaatgatttgaattttttaccattcatttcattataaactcttaaatatgtaccaaaggaagaatgtccaataggtctattactcggtgatgcatcaactgaaattaatcccttaactaaatctttcctctctaatgataatgccatacccgtacgtccacccattgaatgtccaatgattataactggttccttaatttcatcttcaatcaatttaccaacatccattgctaatgtatgataattgaaaggtgtcatagctggtgaatctccatgacatcttaaatcaactaaataactctctctatcctttgataaccatctactaactgtacgtgaattactcttattaccaaacagtccgtgtaaaaacactaagggagtcttaccattactcttcactcccaacctatcaaatgctaaacgaactgacatcactggccttaaagataaaaggagtaataagtacagaggcttaaaagtcgaaaggatccatcactatggaaaaatcaacatgaaacgcggtacgcgcttttcatacctgtcaaatttatctatcttgcatctttacgacctttatctgcctgctaccctttataaataccttcaagtccctgatgatgtattataatcactattacttcttctctcatttagtaaatgaatcctttattattttattacttatcattagctttagctgttccactcggtgaaaaaaatcatattcatcatcaacataaacgtgctcctaatgctgatccggtagcagatcctcaaccggtacctcaacctcaaccaattgctgctccttctcctgaaactgtatacgtaacaaatatagttatgatggatcaatttgatgatactgctacatcaactactgctctagattcaactccaacttcaacttcaacggacactccaaatttcagtattcaactggttaataaaaatttacaaagtgaagcatccccaagttcaactgatagctcaccaactacaactcctgaatcaactactgaatcaactactgtatcagttacaacatcagaaatagcttcatcatcaacagctaattcagaaactgctcaatcaactgctcaatctaataatagtagtggttcatactccggtgctaaaggtattacttattcaccatattctaactcaggtcaatgtaaatcatcaagtgaaattgcttcagatatggaaaaattatcagaatttacacttattagagtctacgctcctgattgtaatgttatttcagcattacttgattcactatcttcaaatcaacaaatttttgcaggtttattctatcttgattcaattcaatcagatgctgaattattagcaactcaagttaaatcatcatctcgtggttgggatgcaatttatgctgtagctgttggtaatgaatgggttaattcaggtacttattctgctgatactgttgtaggtgcagtttctaagggtagatcaattttacaatctttaggttatactggtaaagttgtgacagttgatacagttcctgcatatcaaaataatccaactctttgtgatgcatcagattttgcagctgttaatcaacatgctttttggaatggtaatattgctccagaaaattcaggtaaatttattagtgattcaattgattcaatgtcaagtttatgtaataaagatgtacttatttgtgaaactggttggccaactcaaggtcaaacttttggtagtttaggtgttcctggtaaatctcaacaatcagaggcaattcaaagtattattagtgcagttggtgataaagttattctatttacaacttacaatgatctttggaaacaaccaggctcttatggtgttgaacaatactggggtttgttttaattaagataataatattttatcaataataataatatacaattctgtttatatacaaatatatacccttaaatatcgatatattaatttatttacttttctgttcttttatctccttttgttgtttaattttccatgttaaatattctacactatgtcctaatctaacattactatcatcatttaaaactctattttgaatatttaatggtggtcctctaaaccataaaattccattcttatcaattttacgaaatttttcacgtaattcctttggatcataaattccaatatcattttgctttttcttgattgatccataaatcctactaatattacttctatcaatatttttataacttctacgaattaatggatgaatagaagtttctcgtatattaaataaatcattgtattctctaacatatgtaaatgatgtacttggtgattgaaatttagaatatgtaaaacttgtattattatatggtgatttgattattttatgtgttgataaattattaattgatgatatgttattattattattataatgatgagtttgattaacaatattatgtgtattaataatagagttattattgataattgaattattaacattatatgatttgaatttgttatcattactatcatttaataatgataatttttgaacttgttcatattctggtgtatttgtattatgtgaatatgaatcactttgattatttaaattataattctcaattaatgcacttgatggtattctaatgttattagttggtggtacataacttttacattcattttgatttaatgaattatcaaaataatgttcatcaatttcatcatcaactcttggcacataaactgcaccaacaactggtggtgagttcatattaataattattggacttggaattggtgtactacttgttgatccaggtctcaataatcctttaattggtgatgggaattttctcaaaactctattactacttaatgttttaattggatcctctaaatgtctaacttcatcaggtaaacaagctttccaagttctgattttagcaaatgtattttctttatcattgtatctaaattcacaaatgaataatggtccatcaaatggtataccaggatctccctttaaccatcttgtaaaatatgcaacataacatggacctaaaatttcgttaactaaatgatctctatattgaccagttttaacaacttcattctctaaaaataatctatcaactctatgaacggtccattcaggtctataataccaacaaacattcatacataattcaccattttcttgttgccataatctaaaaatttgtgcaactgttggtctttgaggatcatttggattattaattaaaatccaattaccaactttataagttctaccattaaattgaacttgacttaatgggaatttatttgtttgttgacctgaaatatattcaacatcaggttttgacatttcaatttgatataatcttgaaatatttgtttctaaaacatttaaattatttttaataaattcattattaacaaaatataatctattgttattaattaatttgaaaacatctgcaacatatgcgtcaacagttttataatatctttgtttaattaaacctttaatatctaacattgaaattggatctttaacaatttttaagtaatcaggatgttcttgttgaccaggtaatttatcccaaaatgaaaccattgttttaccaccaactttaattttctttaaacctctcataattgatttaattctcatttcatgaggtttatcaacaattggaggacgaccacgtttaacccattgatctaatacttgtctatttggtgtgaaattaagtacatttggaggtggatagaaaacatgatctttacccgtatcctcaattttagagacataagttgaaggattataattttggttaattgtaaatttatcttcattatcataagtttcttgatcattttcattttcataattatcatcatcatcaatatgttgttgtgagttagtggctgtagttgcattgttaacattagtgttcatattagtgtttgtattaataggaatagattgagtattgatattattattagtattattacccattgatatattatttggattaatggttgttatatcatttggattaatagttgacatttcatttggtaaaggacccaaattaggataagttaaactataagtattaacaattttatgatcattctttatttttggtataactgtatccttaatataattatctaaaattgttgcaaatttataaaaatcagaagtttcttcattaaagaatcttgcattccaagtgatttgagctaaatcattgataaaagcttgacttgaagtatatttatgatgctttgatgccattttaatcttagaatatgacattggaactttaattactttataatattctaaatttgcacgtaatggtaatgcatggaaggcgtatgagaattcattaccattttcatcgaccaatttgtagatatcatcgagtataccaaagaatacatcgttcatataattcttatccctctcactaagtgacattgctgctgttatctaatttaaaatatacgaaaaagataaaaaaaactacaattataaacaacaagctcgttgttgacggcgttaatttttttttgattttcaaagaggtcctcctatagattttcattacgtaagtttggacatctctctatctatctcttaaggtaagacaaaatacatcagtatggacagtatggacagtatacaggagtttcagaagttcttatatgacaagacattggatggacgaaggataaatgtgctggctttggtgggtgcagggctatctgctccctctggtgttataccctcaaatataggtgatactgatggtgataacgtttggaggaattattcatttattgatttagcaacattagatgcatttgattcaaatcctgcccttgtttggttatattatgctctcaagcgacatcaagcattaaaggcagaacctaatgaaggtcataaggtattggctcaattaagtaatttgaatgataaatttaatttactaacaatatctcaaaatatggatggtttacatcatagaagtggtcataatagagagaaattattagaatttcatggttcattatttaatgttaaatgtacaaattttatgtgttattatagtaaatatacattaaaagatcccttaactgattcattggatgctactaaatatgaagattcagaaaatacccaattacctacaatcaattcattagatcaattaccattatgtcctgaatgtttatcaaatggtgaaaaatatttacttaggccaggagttatttggtttggtgaatcattaccattatatctaattgatcaagcagatgaatttataattgaaaatgatattgatttgttattagttattggtacttcgcatacggtttggccaacatcatcatatattgatgttattaaaaataatggtggttatattgctgtttttaatatagtggaagattcagagattgataaaattaaagaaacttcaaatacaaaagtttggaattttattggtgattgttcaattacattaccaaaagtgtttaattcttttataaattcttaataaatatacatataacttatttgtctaattatttaacctaaatatttccatattaaatacataatgaataatgttaatgaaccgaaaacatagaatataatcttatcctcccataaaactttctcaattttaccaacagtttgatgacttacacctaatgtttctaatccttgactcattttatcacgtactttaaataaagtctcattttgttcaacaatatcatcaaatgctgctctacccatctctaaaatttcatcaagtctagcattacctctctgtaatttattctcttgatccatcattgaattaattgaatcatcattattattatataaaatatcattgaatcctttgtttctattatttaatccattatatgggttatcatcaattccacttgctgttgattgttcaaataatccattcctttcattatttaaattcatttgtttaaattcatttattttatcctctcttttcttctttaattgttgaaattcagttcttaattgctcatattcattgaaaagtctttcatatcttaatctattcttctctttagcattaggttcagtttgattgtttatatatttgtcaaaatcattcaataatctattaattgaggttaatgttgtggaaattgtaccaattaatgataatgtcataccattcgatatattaccttcatcattcaaattactacttaaagtagatatatccttactcacttgattgacatgtttagtagtttgtttatataataaactcattgtcttatactacaccagcgtgccgatagatctataaagatgaagctattcattgaatggcatacattattacgtaaaatattatttcccatttcaaaacatgttaataaacaacaatacttaacacttgatcgatcatacttctttcaataattaaactattatacaaacattatatctactataataatatctaatatactactattcattttctaaattagctaaaccatttaaaccgaataagaaacctaattcttttctacttaacttacctgcatttctacgtgcatttggatcgagtgcagaaccaaccatttcctctttttccctctgtaattccataattctatcctcaactgtaccttcaattaataatctatgaacgaaaacttccttcgtttgagaaattctatgaactctatcttgagcttgcttttcaacgaatggattccaaaatggttcagaaataataacatgatttgcacatgttaatgttaatccaacattacctgcctttaatgataaaagtaaaattcttttcatcggatctttataaaatgaattaatacaatcatttttagcattaatatccattgatccatcatattgtaaaaattcaaaattattttcacttaataagattttcaataaatcaaaatatccaataaattgagagaaaacaataattttttcagtacttgactttttgaataattctttaataatatcaattgttttattcatctttgcagtaattaataaattaccaccatcttctgcaataaatttttgtaaagttttcattctccaatttttatcacttgccttagaatctaaatcaaattttttcctaatttcttgccatgttaaaccttcaacaaatgaattaaataattgtaaatcaactgattttgtagatgaattataaattccacaaatattacattttgctgataaatcatcacttactttactttcacaattatcttcaaaaaattcatcatgacaatcataacaaattgtatgaccacatttactcattaatagagtttggttagttgttaaatcttgattacataccatacaattaaaactttcttcattttcaacttttgcaattaaacctttgtaaacattatcactatattctttaattgattcaaaaccatttttaaatctatccagttttaaaactctatcaccatcatcacctaatctaactaaatattgatgatcacatgattgtctcattctaagtaacattgttaaaattgatgaataatttgtatttcttgaatttaataaattatttgcagttttagcagatttattctctaattgatcataaaattctttctcaattgtacccatttgaactttaacttcagtaacatgtttttcaggtaatgataaaattggtttaccatcaatttcatcatcctttgtacgtcttaataaaattgcacttaataatgcatgaattttctttgtactaccacctccaccatatttattattaaatgatgaaacaatactagtattaaatttattccaatcattataaggtttaatatctaaaaatctaattaatggatataattcttcaattttattttgaattggagtacctgataaacaccatctataagttgaagttaaaaatgaaactgctttagatgcaattgttgctctatttttaataaattgagcttcatctaatataattctatggaaaattgcattatttgtataaaatggtgaatttttcatacctttgatttttttctttaaagaattttgttgaatatctaattctgtaccataatgttttttccattcagatcctaaagtttgataactaattaaaacaatatcaaattgtgataattcattaaaagatttaactttattacttgaatgataaaggaaagttgttagtttataatcactttgtaatttcatattaatttcttgttgccattgttgtaataatgaaactggaccaacaattaatgttgttttcaaagtatcatcctttgatttatttgaaacaattaatgaaattgcttgaactgttttacctaatcccatatcatcagctaatataccacctttatttggagaattttcaattttcaacatccaagataatccaattctttgatgttttaataaagtaattgctaaatcttttggagtattggctaaaccttcttcctcaatttcacttgccttaatagattccattaaatttttgataccttcttcatcattttgtgcattattaccaccattactataaatatttgaaaatggtaataaatcatcagtatcatctctcatattattatctaaaatttcaaatatttgattagatgagaaaggatttgaaggtatttgataattattattatttttcattgggatattattattgttgttaagattattttccataggattatttggtaagggtattttaggtaaagcaggtggagaaagtgagaattcacgtaaagttttagttggatctgaattataattttgaaattgatacatcgttctaattgtattattcattagagtaacttctggtaataatttcataaagattttatttgaaggtattgttaatgaagctaaacttgaaccatttctaatactattaatacattgaattcttaaattttctaattttttggaattttcgattgttttcaatttataacttttcaaacgatcaattaaaagaccaacttcaccgaaaaatcttgaaagttgtgttaatcttgaattaataaaacgtaaaatttgattataacgtaaatctgcctttttattaccattatattgtttagctttagcagttatttgattttttaaattagttacatttttcaaaaatatatcaattcttgaatataaatcattaaatttcataattctaaaattaagtgaatgaattgtaaataatacatcatctctaaaattcataacacataaaggtggaggtaaatttgatgaaatatctaattgaatttcattccatgatatagtatttggtaatatggggaaaggttcagattttaaattattatttataattgaaggaaatggtatttgatatttttcaggtaattgtttaattggaggataattttttaataaattattaattcttaattgattttgatgattaatttcatctgattcacgttttaatagtgattgctgaaattcattctctcttttaatattttgttcaactaatgattgtttatttgcaagtatttgttgtctctttaaatcatcaatacgcgtagatgatgatatgtcatcattcatttcgcgtttaaaattattattttgcgtattaaaagttggaggtagagaatttgaaaataaattagtgaatgaattatcagttgatattgaaggaggtttagaaggtgcaatacctgttataattatatcatcatcatcatctgaatcattatcattatcatcatctgaaccatatttaaaagctaaattagggcgtttattaatattttttattggtattggaggctcagttggtatagttatattattattattcacgttattattattcacattattcacattactcatattattatttatacttgtatttatacttgtaggttcggatattttcttcttattgaacaacgtactatctaattttaaatctttagccatatcaaaatcatcgtcatcatcttcttcatcagatgttaatgatatataccctggtaaaggagttaatttattgatactagtattattattactactaatactattattattactaggataaagattagcagtatccatatttaaacgtcgtatatttgccattaccttttaaaaaagaaatgcaaattcttatatataaaacactacacaattataaatcgccattctctaattgcaaaagaactgttgctcgcgcaaatgctcctcttaatagagggtgatcacccttaattgagatacctctctggaacgacgcgacggcctctctgattaaaccacaatgtaattgagctgtaccatgtctgagatgattatcaggtattgttgcacctagtaatattaacacttctgaatcttgtaatgccatttgataatttttcattgccattgatgcatcacatctacccattaaacaaactaagaattcaggtaatgaaccttgaaatggttcaaatgatgatcttgattttgctaattctaaacctcttgtaaatgcagtgaaagcttcattaaatctattttgacgtaataatccttgacctgttttcatgtaattttttaatttcaagtgataattcttttgtaaaacttgtaggtgatggaggtggtggtatatcagaatttaatgaaataaatgatgaataaagggaatttaattgtgtaatttcagtttctaattgagtattatcagttgatatacttttagatgtagtattgtatgttattggtaatatagtcattgttgtaataagaaaagaaatgatgattataggaattgttccattgagaaaatcaaattataaatccatgatactgaaaaattaaaattaaaacacgtattatctaatctttatacttcatcttcactatactaaacatatgggtaaatattattgtcattactgtcaaacacatctaacacatgattctccatcagtgaggaaaagtcatttaaagggtagaacacattgtcaattagttgaagaatattacaggaatgttataatagagaagaaagatactattatcaatactaatagtactaatagtactaatccattaaacagtttactattcaaggggataccaggtagtagtaataaccctacacacacactaatactaccatacccaccaacagataactcactaccatacccaccaccgactgtataatagtaatactaaataacaccaaatttccgagcagagggtaaatttccgagcataataatactaataataataataataatgatccgtcatagtaataagataattttccattgagtggcgaaaaagtttttttcttcctctcatagtgttattttagcatatttgctttcatcactttatacactcccttctctccttttaatagcttcttttttttgtttactttcctactttctttaaacaaattaatattcaaacaatggcacaacaagttccaacttttaaattagttttagtaggtgatggtggtactggtaaaactactttcgttaaaagacatttaactggtgaatttgaaaaaaaatatatggcaacttcaggtgttgaagttcatccaatgtcattcttcactaattttggtgaaattaaattcgatgtttgggatactgcaggtcaagaaaaattcggtggtttaagagatggttattatattaatggtcaatgtggtattattatgtttgatgttacttctagaattacttataaaaatgttccaaattggtatagagatttagttagagtttgtgaaaatattccaattgtactttgtggtaataaagtcgatgttaaggaaagaaaagttaaggcaaagacaattactttccatagaaagaaaaatttacaatattttgatatttctgcaaaatcaaattataatttcgaaaaacctttcttatggttagctagaaaattagttggtaataatcaattagaatttgttgaatctcctgctcttgcaccacctgaagttactgtcgattcagacttaatggctaaataccaagctgaaatggatcaagctgctgcaatgcctctacctgatgaagatgatgctgatttataagttcttattatgtaatcaaatactttctctctttctcactatataaaaaaaaactaaaacttttttcaaccaattaaatctcacctccttttctcgcccttttttttcgcctactctccataatacttccatttgtttagtgtatagtacaggtacactaacatcttttgaatattgatttaaacaagctaaaaatgttcagacaatctttaagacaattctcaacaactttaacccgttcaaacattattgcagatctttatgttaaagaattaaaagcttttaaaccaactcctttaacaaatgctgatgctgaatctgcaacaaaggcatggaaattaccaagtgctgctaaaattcctgcaattgaaggtgaaggtgctgatgctttagctgcttatgaatctgctcctgttgatgttactacttcatctgctgatggtaatgttgttgcagaagaatataaacctgatgattggttcgttttcccagttgatgaagaaccaggtcatcatgctcattaatttatgttattataataatattcaattagagagtataatatagtatggtatactttacatttatatttatattatttatttatatgaatttatattatttatttattacgaaaaaaaaaatatatcaatttaattcaactgttttaggtttatcatcatcatcattatcaccaccattatcaccattgttacctacttcaccattatcatcattatcattattattatcatcattattattaatattactatcaattctaattagatcaccttcaatttcattaaatgtaattatactattaccagttaacatatcttgtaatttcttatcttcttcactatcattctcaattgggaatggattattagaactatatcgtttaccattcttttcaatttttaaacttttactacgttttggaatatcaattaaactaactttaggaaatttattattaatattttcaacttcatcttaatatcattattattaatttcactactctcttgaataattttctcaatttcttcctttggttcaattaaaattttaggtaattcattattactttcattatgaattgaaaatggatcttccttttcaagttcacttatttcattttccttaatttcactagttttatcaattgttaaacttgaatgacttttagatccggtatttgaattagtattaatatgactactactactactattcatattagtagaattcatattcatattagtattaagattaggattaggattagaattagaatttgtacgtgtagaattcatattcattgtattattcatactaatactattattcatcatttccattggatcctttggtaatcctttaaatggtgaaaacattggtatgatacttggattaaatggttcaattgcaggataaatttgttcattatttggatatttatattcacctaatccataaaaatcattataaccatcatttataattaatttattaatttcttcattatttaaatttttaatttacaaatttcaattaaaacttgataaatatttggtcctaaaaattggattctcttgtaacattatattaattaatttttttaaattattattaataattggtttaattgggaatgaatatgctgaatgtaaaatacctaattctcctggtatttcaaatggtgttgtataataacataatttataaagaaatacaccaaatgcccaaatatctgatttttcatcaattggtaaacctctatataaatcaatcatttcaggtgatctatattgaggagttgtttgcattaaaatatcattatgtaaaatttgaaattcttgatgattttttggtacccttaaaattggacatgttgaaccaaaatctgctaatttaaattcaaaattttcattaattaaaacattctcaattttaatatccctatgaattaatttaattttatgcatattaaaattgctttacttatatcaaacataattttcaaaatttcttcataatttaattttgtacgtaattttaaattcatataatctaataatgatttatttgaacataattccattaaaactaatacttcatatttacctgatgatccatttaatctacttgcatttgaatcataatatttaacaatattatcagatttacttaatcttgcataacttcaacttctgctcttaattgatttaatccttccttatttggtacaataaccctttttaaacatgcaatttcactattttgttcacttggattaattttaacaatataaatatgtgcaaatcctccttcacctaaaaatttcataattgtaacttgatgtttaccaacaattaattgtgtacctggtaacagtttctccaacattgcaggtctaacattcataccttgttgtggaacttgttgtggaacctgttggggtacttgttgtggaacctgttggggtacttgttgtggaacctgttggggtacttgtgggggtacttgttgtggaagttgttgaggtgcttgttgaggaacttgttgttgtggtatttgaggtacttgaggtggaatttgtggaatttgtggtacttgcggaacttgtggaacttgtgaattattataatgaccattaggtgaacgaatatttggtattgaattttgttgttgaatatgtgatgaatttgaagaaattgatgtattatgatttaaattaccattcatctgtgattgactaattcttttaggtggtggtattggaggaatattttcaaatgttggattatgattaatattattatgattaaaattaatgttactattattaatagaatttggagtattagttgaatgtatctttgcaatatctggcattacaatatttttattatttaattgaattgggtttaatattggtgatgttgaactcttatttgattttagtgatgaacttgtattaaaattaaattgtggttgtgatactgatggtttattaggaattattggttgttctaaattaattgaattaaatgatttattagatttattcatgttaccatgattatatatcaaattaggtgaattctgttccattgtttaagttcaattgatttcaattgatttaaaataaactatgtattaaatcagaaaatcctaagagagacttaataacatgtgataggtataggtagactaaatttataacccaataactgcctaatagactgtttaaaaattgaaagggttgtgtgatttgtcaaacagtcgcgactaagccttttgaacttttacacgtgataagaatattttaaaaaaatttaggaaggagtaactttaagtactggtttaatgatgaaaacaaagtaaattcgtatcaataagttaaatttacagaaagtggaaagttataaaaactatgtatagtaacaaaaaaaaagcacacgatattagaattaaaatttttgaaataatagactaaacagttatcatcaatataactatccagactctttaccattaccaacttcaataacttgttcatcaactgatgagttagtatttgaatttgtattcttaaaagtttctaaattaccattaccagttaataatgaaccatcacctaattgtgaaatatcaaaaccattttcatttaaataagctaaaaattcaaaatcttctctttgcattgcttcttgatcaactgctggtaaaccaaataatgctaaaatacctgcaaaaattgctaatgatgatgcaagccaaaatggaacttgtaaacctttaacaccaggataatgtttttgaaatgatgggaatgcataagtaccaacgaatgcaccaattttaccaactgcagctgcaataccataataaacacctctaactggagttgcagaagttttagcagctaataaaccaatattatcacctggaccaaattcacctaatgtcataaaaataccataaactacaacgaatgcaccaatatgttgttcaagttgtggataaagacctgccataatataaccaataattgcttgtaagaaaataccaaccactaaagttactcttggaccaaaataatcagttgcaatagcaccaaggaatgaacctggtaaatagaaaagatttaaaacaacattccaaccaaaagttttatataaatcaccatctggaataactctctttaaaattggtgatgaataaataccaaatgcataagcggagaaatcataaacccaccaaataattgaaacaattaataatctaaaccaataatatttaataattaataagataggaattctagtacgtttaaaatttaatttttggaattgtgtaccttctttaaagaataatctcattatgaataaagaaattggaggaattgcaccaatacctaaagtaattctccaaaccggttgtaaatgatctttaccacaaatccataataaaaccattggaacaaaagctgagataacaaaaccaaaatcaatcataaaattagtaaaccaagtaaaatatctatttcttttacctgcaggtaataaagatgaagcttcagcacaagcagctgaaccagttggatattctgcaccaatgaaataacctaaaaagaatctataagcagttaaagccgcaaataaaccacctgcattaccaccaacatgagcttgagtacctttaccccaagaacctgcagctaaaatagagaaaagaattaaaccaccagatgatacaagcataccaatttttcttgagatataatcagagaaaacaccaaaacttaattgaccaataacagtaccaacaaaggcaattgcagaaacattttgtaaagcacgagattcagtatattgatcaccataaatcatggaaagacaagttgaagcagtaccgatagagttattaacataaccatcagagaataaacctgcaccagctgtaaagataggccagtaatcttttttaccacttggagcaatatcttcttcttcaattgtaacaatgttaccatttttatcagtaacttctaagacttgtaaatcttctggggtaatagtatttctaccccaagtaatttcctttttaataatagatggtaattctttgaaaggcatttttgttgcttggagagatagaaaaagaaaagaaaataaaatatcaaaattttaatataaatatcaaaataaataaaacatgcatgaatagtgaaatacctgagaaatagacaagtttaaatagaccagaaagtgaatttaagaagacggagaactgaaaagaaaagaaagaaaagaaaaaaaagaagcagataacaataacgcggcaaattaattattaagttatgacattgagttttaaagttttattaagctattaagttattaagttattaaattacatgtgcatattaaattattaaattatccttcctaagtaagtaatatctttctcctgtaacactctaatatgatcctttgagttatttatccatatcaacgtgccctaactaaagaattctaataattaattgaatatagtacttggttacttaattgatgtattattattatgtattactatgtattactaaccttattactattattaaccttatcattactactactatattaaagtttaacgaatactcggaaaaaacaataaccgcttctaattttccatttacttgtacagagataagagataagatagcaagatagcaaaagatgtaggaaaggggaaaaaaaaagaggggggcgatgtgcatgctaaatttttatcattgagataagtgataacgtaactgtatagtatagaaatcaaacgctcatctcatcgtagagaaagtactaaaaataataactgtatttaatgtacaatttgacatattaacagtcaaaagatgtaagtacaatttcaaaaactgttgatgatggggtatacaataacccttacatcaatacgggaataaccctctgttaaatatacaatttgcacgtgggagagagcgtacagttaatattattggcatgtgaaaagtgaaaagcccggttatactgttaccatgtgaaaattgttatctttcatttatttaatttcgcggctgtgttgtttgaattttttaaatttgaaaaagagagataaggatttattagtattatactataaattacttccattacatcatccattactatattacaaaatattgacaggagagtggatagttgattgactaactgtacagacaacttagttgacaaataatgtaatgatattagtagatatttatttaactttatttaacttactggtaaggattaatattatcataatattgttataatttagtacctgaacgtgggagatggcattgatcaaacgttacttctacacatggggagcccaatttattttaatttacgtaatattttaatactagcacatgctcatttttcggtaattgacttactacacaagaataatcactattactatatttaatttcatcaggactcttccaaatgttgagcttgctaatactctttaaaacatgaaatttttcatatctgaaattaaaattagcagtttgataaaataaaattattaatagcacttctggaaaattctttattattatgttttttaagttaagagttaatttggagatctttcaacgtagcattcataagtgttaaaatttattctcttcttcttctgcaatagataatcattagtaactaatcttgaataattaaaacaaaaaaatgtatacttttcattttttttctatacatttgtctgcatagagaattttttttcctcttaatattgatgttctgaatatctcattatacatcacaaatgtaaaaatttcttctttcatcttgtaaaatcaatcaaccatcaggtttaaattcataagtaaacataataccgattggaaacgcgttttagtaatgtcacgtatatgagtaagtcgatacgacgattgtgaaataatcaaaacatgacgcgtaaggaataagtaaaattattttagattattatatacatcaagatcctacaaaatttcagttattatttcacaaagctttcaatagagcaattatatacactaaccgccattacaaacagcttactatcatcaaatggaagtgtttgaacaactggaagaaaattcagaaaagaatgctaactacttattagtaaataataatttagaaaaatcaaataataccgatgaagataatagtgatattgataataatatagataataataatgatattgaaaataatgatgataatgatgatgataatgatgatgataatgatgatgataatgatgatgataatgaaaatgatgattatttagcacatcattctaaaatattatctcaacaatttggtattcaaaatgatgatgatatagatacaagtacgattaatcatagtaataataataaatctcgtgatttgacaagtgtagttcaaaagatgaaacttaaattattacaaagagaagagaaaaagaaagatcaagataatcaagataatataatattaactaaagaaacttcaactcaaattcaaatacaagatcaatcaactcaaattgtagtcactcaagattttaatgatgaaaataatttccaaactcaacctataaagtctacacctattggaaaatttgatgaaatttcaacaaatattatacaaactaacggcaatgataatcttgaaaatgataatctagaaaatgatgaaatatccacaaatgttatacaaactaatcaaaatgatgaagatgacgatgatgatgatgatgaaataattaaagttaaacctcgtactcttaaaatcactgatgaagataccaaccgagaaaaagaagacaataattatgatgacgacgacgatgatgatgatgagggtgatattatcaaaccaacacaaagaagaaaccgtattgttgatgaagatacagctaataatgaaaaaaacgcaatttcaacatcaaatatgacttcattatttgttcaagatgaagatggtgatgaagatggtgataatattgaagatcaagttaatgcatttcataaaataacaaaagaacatgacttcttatcaagaaaagtttcagcagcaaatgaacataacactgatgatgattatctgctgaataaatcaaaaatgaccttaaatcgtaaagagataattgaagagaaaagaattaaacgtgaagaattagctagacaattccttcaaaatgaattacttaaaaaggctgctgctaaaattgaaaaaattaatccaaccacttactcaaaacaaaagttattaagttcgttaaaggcggatgcttcaaactctgataatgatgactctgataatgaaatcaataataacacaaaaattgaaattgtcaaaagagaaaatactgattctgataacacacaattttcaaatttagattcacaggaaattaattcaccttcaacttctccacttgttgaaaatcataaaaagaaaataactatcaaaagtgttttaaaaagttggaaaacttcatcaacgcataattctgagtcaaaattagttgaattaaaaaatgaaaagatagatgatgaaagtactaaaacacacatcaatctcgatgattcttcagatgatgaagatgatgatatggacgtaacaatgattaaaaagactaaaactttagatataaaattaataatatcaagaaaacaaaagaataaaatagagaaagttcaaaaagaaacattagctgataaaattaagaaactaaatgctaaacaattaaaaatgaaatatatgaaatcattaaatgatgatcaatataatcttaaatcaaataaagagaatggtgatttaactgatgaaatgttagctaaaatgttgtatgaagaacagattaaaaattctaagcgtttaaaacaacaaagtaaacttgagaaacaaaaagaattattaagaaaaggtaaattcccatctcatgatgaatctgaagatgatccagaattcagtgaatattcaagtgaatttgatatgtctgatgatgaagtacaagttgaaaatgaagatccagaaggaaaaaatgaagataaagaagaacttgccacagaagataataagaaagaatctgaaccagttatatcaacacaaaatattcaagatgatacatcttttaagttaactcaaaatgatgcattgaaagattttaatttttcatttggtgaacttgcagatcaagatccaactcaaaaatctcaatcacatttaaccactcaagaaaaatttaagaggttaaaaaatattagtatgactgaacttcaggatgaaaattcatcgaattcaatatcaatagataatgaatcaagaatatcgaatgatacttcatttttaacaaaacaactaaataatgctgatgctaatgaaaatcaaatccaaaaaaatactagtaatgataatgaatcaaataaaataaatttcaaagaacttcttgattcacaaaatcttattcttgaaactcaaattgatcaacctttagaattaactcaatctgtctcacaatctttaaatacccaaaatgataataatctatttgattcaagtactcaaaaccttgagagaacagaaacgatagaaattgaaaaaaccgatacagtggataatattatggatactaaaaaaggggaagaaaaagcaggtgatgaaaaagaagaagatgatgatgatgatgatgaaaagattaaaattccaagaaaagtccgacttgacaatgactctgatgataatgattctgaagttgaagaaactgaagaagatagacaaaaagttgcagagttaattaagttagctaaaaagaaagaaagagaattagctaaacaacgtgaacgtgaatttaaatctaaaggacttggagatattatggaaaatgaagctgttgaatctgatgatgaatatcacggtgttggtggtgcagatagagatttatcagatgaagaaaatagtgaagatgaaaaattaattgatgatgcaagtaatattcaaactgatgaacatgaaataagacgttatcagcttgagaatgaattaaaggaagatcaagaaaaagtttctagaactttcaaagatattaaaactcataatttaactaaaagaagggcaaaagatggtgtttatgcagtggatttatccgatgatgaagatggtgaagagaatgaagaattattacgttggcgtgaattaatcagaagacgtaaaattaaagaaaggaaagagttcatggcaaataataaatataatatttcagaaaatgatccaaagaaaccattttttgatacaatggcagtcaatttaccttcacatatttcaatttataaagattcattattgttaactgaacttgatgaagataattctgatcatgaagctaaagatgtaaacgataatgatacaatcactaaaagagattttcaagattattacaataatacaaataatgaaattccatcttctagtgcttcattgaaaagacgcaagctcaataaagttaaatcatttaatgatgatgatgatattagattcagttcattcaaagatcaagaatatgagagagcaagagatgaagttttatcaactgatgaggaagatgatgatgatcatgatggttctaaacaattaagaatgttaaagaagaaaacttctgtcaaactgcaaagaagaaatcatttgaatagatcaacgactagtatttctgaagatgtacatgatgaattttcagttggacttttgtcaaataaatccaattcaattactgcatcatttaaaaagattacagagaaaaaggttaaaattagtgctaatacaggtaaaatcatcagagatgtccaagttacaacatcatctaaatcaattgccaattctaaagttgctgtttccagactaacatcaaatgaatctgagaataataatttaatgaagaaaccaataaaaggttcaggtattgatagacttgatagaatgcttgctaaaggtagaaagctgggtatcaaaaaattatcaaaacatcactgattgatggtctttatagaaaattgtgtacattatatttttataaattttaggtattatagcaaagaagtagattatatatattattacaaaattgattggttgttatgcatgtgaaacaaaccaagtaagatggttttatggttcattggccagcgcatctcttagtgcactataactgacccttgaactaaccactgagttttgattgaaactagagccatatccatgtcttaccatacgtcttccatttctatcaattgttaaagatgaggaggatgagttaaaggttggacgttcatttaaaatatttctattcaactttattggtttagtggttttttgtgggccagctccattttgtctttctctattcaaaaaactctctgatggtaatgtttcagagtcattgttatttattgtgtcaacatcaccactcatgaaagtggaattcggaatgaaacttttaatccaagatgaaattggttcatcattggtataatcatcatttattgatgaagcttgattattcagttttggaactgaaataggagttaaaaatattttagaaggtatccaagaattgattaatggagttttagaaacatcctcgtgaatttgagtcttatcagaacaggtaggtgatgaaatatttaaattattgacattggaattcaaaatgtttaacatatcctcatgcacattagtgctatccttgaatgtattaaagaaagcggtatatggttgagcagatgatgatacaattgggttattaggtttcaaccatttcatagtttgagccttaagatcaagatttttctcccttagtggatattgttttgctgattttggatccacagagaatatactttcatgtgatttacttcgttttaatgtcataagtgatggtttcttaaaaaccaatggtgttacattttcactaccataactatcagtcgaatcagaatcagataatccttcgttataattattatattcatcagggtctatatcactataactgccattaattgatgttttgttaacagaatatctcttctttcttttgtatcttgattttatgtttgatgtattagtttgttcaaacgaaaagagtgagtcagtaatttcagtatgtttgagtttatcattcaagaatcttttattcaaagcagccccatcagacacaaaatgacgtagagattcatcacttgaaattccacctggcgatctattaggtaatgatatatgatgtctaagttgtctttcatcaaaagatatcgtgatgtcttggtaggtatcttgatcagattctatcatttctgattgaacattaccacgcaaatcatcaaaaagttcaaatgtctcatcaactccttcatcaattggtggaagatcaattaattccaattgttttttcattgattttgaggaagctttacccctaatagttttggtattttgcgttttcttctctgtgttatcatacaatgggttttcactcatagtatttattttaaatcctttcagtggataaatttctacttctttttttgattgcataggtgttatattgtgattaaaatttaagaaactttccattttcaataacttcttttctttctgaacatcgttaggatttcgttttgtgtctttgattgttgaaaaagatatctcagaagatgaataaccttcatccattgatggttgtaaatctgagttggagaatatggaagttgatctcatatctgagtgttgtgaaataattgatttatcattaaatgaactatcttttggtaagtgaccattgacaactgttaattgttctttaagataatcgaattccgtacacaggttatctaatgtagtctcagttgttctccattcaattttagaattaaaatcatcaggtttaaataaataagtatcatttttaactttatgctttctttcaagattattaacttgcttttgtaaaaattcacatcttagattcagggaagtcatatgttgttcaaaaatatctaaattctctaattgggtttcaatattatacagttgatcatttttggctgatatttctctgttaagtgataataattttttctgtaaatttttattgacatctaatacttttttggattccctttcttgagaagataacccagttctaaaagaatgcattataggagacaagtaaaatataaatatttttcaaacttaacctttccgcttttcttatagcaaaatctagagcactgccttaccaaatataaattaaacaaaagggtaaataaatgtaactcgtcacaaagtaaactaaagttaaagttaatttgtacaagtcaaatcatatatcaaatcattaataactgttgaagatgtttttttcattacaatgttgatgttaaaaaaatctttgtttaccttttgccagatcgggacaggcgcggtacaaattatggcttatctatagacagggtctagtgacagtataatataggtttatagtatttagtaaagggtatgtgttatataaattacatgaatattaaagagtaaagtcatcaatgagctttaattgttctgcaatatcggactgcactttcttctgtttttcctcagtctttacatcattagccaaatcttccttcagtttatctgtgttcaaacttgataatccaacctctttcttactttcaggatcactctcgttgccatcaacagtggcttttgtgtctgtatttgtttccattgacatcattatgttcattatgtcatcttctgtagtattattatccattttttcaatcattgctttaacacttttactcattgacttttgtttggtctttgtcaatggcttgtttggtttctttatcttatcattcttattctttgtgttcttattattattattcttaccacgaaacatctctgtatgttactctaaagaagtaaacctatgttaaactactattactgtacattaagtaacatgaattttttttgaaaaaaacttttttgaagatgagaaatttcctaaacggggttaccacgaataaaaaaatttttcacatcattaacttagattaaggtcttagaaatttactatactgtttcttctaaaagatttttgagacaacgaaaatttatacaaagcaatggtttcaacacataaaaaagaaaaaccttgggatactccagatattgataaatggaagattgatgaattcaaaccagaagataatgcaagtggatctgcattccttgaagaatcgtcattcatgacacttttcccaaaatatagagaagaatatcttaaatctgtatgggcagatgttacaaaagctcttcaaagacatcatattgattgtactctagatttggttgaaggttcaatgactgttaaaactaccaaaaaaacttttgatccagttcaaattttaaatgcaagagatttgataaaattattagcaagatcagttccattccctcaagctgttaaaattttacaagatgatattgcatgtgaagtgataaagattgatggttattgttcaaataaggaaagattcattaagagaagacaaagattaattggtccaagtggtaatactttaaaagctttagaattattaactgattgttatatgttagttcaaggtaatacagttgcagttatgggacctcatcaaggtttgaaaactttaagacgagtaattgaagattgtatgcaaaacattcatccaatttatcatattaaagaattaatgatcaaaaaagaattagctaaaaatcctgatttagcagaagaaaattggtcaagattcctaccacaatttaagaagaagagtgttgcgcgtaagaaacctaaacaatctaaagaaaaggctaaggtttacactccatttcctccacaacagttacctcgtaaggttgatcttcaaattgaatctggtgaatatttcttaagtaaaaaggaaaagaaggtcaaagaattacaagaaaagaaaaagaagcaagatgatatgaaggaagtaaggcaagaagaaagagcaaaagattacgtggctcctgaagaagatgttagagaaaacccacttttgaaaaaaagtaaaaagagaaagaatgatgatgttgaaggtgatgatagtgaaaatactgagacttctgaaggtaaaaaagaaaagaaagaaaagagaagtaaaaaggataagaaacgtaaatcttctgaagaatgattttactttgaatcatctacattttcgcatgctattatattatatttgtacacaatttttttataaattaaggttagatagatcattttcacctatatttgggtatattttaaaagctagattagtatattatggattccattgtctggcttgagtaactgatgccatattttcaccaattatcgaaagtgttccatcatttaaagttaatcgatttactgtaatattatcagaattattgttatttgtcaatgtactttcatctttccatatggaacctgaatcttgatttcttttacgcatcttctcttcttgttcttttattattcgatccaatgaatctgtagcactgtattcactatcattgtgattttgaaaaactttatagttttcagataaataatgatccatacgtggtttggattccgtaggtgtaggtacgtagttggttttagctttaatgtattgatttctaatattttggattattttggaaagtctgggtattgatgtatcgttattttcctgatacaacaaagttttgaaactttcaacatcaaatggttctcttagagtggattctgaatccttttgaacgttgtcatttgatttcattgtctcgttcaacatgaagttatcatcatcatcatcatcatcatcacttttcccaccagttgaactaacatcattagaatatttctcgaagttactagctttttgtcttttcctaattctccattctcttactagcaatattgacaatccaaccatgctaaacaaaaaccaaattccaagaatacataaggaaatataaagcaatatcatgttttgatgtttatagaatttaattacttgatttaaaatattctttgctttacttttaaacttttcaacagagtcatcaaatgaatcattaacattggcagctttaatagatgccatttcagctagaatagttttcggatttaattctggcatttctaaatgggcattatctgataaccatgtcattgcattttcaatttttttaagttttgattcaataacacatccaacaatttgttcaataggttcatataatggagttcctttgaataatgcatctaaagctttattcattttttcatcaaattcagatactgtattattaatagtcatagctgcagtatcaacccatgcaaatagattatcattaatatcatcttgataatcacctatataattattggtctcatttgtccattgattcaaagaatcgttgaacgatccatatatttgagtttgtgtgttatgaaaaagctcatttcctttctgtgaaaaatcaagattggaaataaaagacagaattatgaattgacaaataacagttgcaattcctaataagcctagtaataggaatgaaagtaagaatggtgatgcagaataattgaaaaaccatcgtatattgtttattaatataggatttcttaaacgaaatatcttttctgtgataattgaactcaggaaattagatgttctatcttgcataattttgataacttcaacattatattttttcttacttgaagatttaataaatgattcattggtaaaatttaaatgatttgcagcttccattattcttctccaatcctttaactctctataaagttcatatccaataagcagtaatgcagctaatccaattatccccataataacatgtgtcgttacttgagcaacattaatcatatcaacataaatttcatttattttggcacttccattactaaaatcaagttgagttttaggtggtacatacatggaatctgcatcaaatgtattattcaaatgagtattaacttgtcttttcaattcaccaaatggtttatcaattatttttcgtgtaaaattttgaacatcagtaaaatcaggtattttatcctttaaatcttcaattttatcattaatactaccaggtatttgccaatcttgcatatttttgatagttaaattaactttatttaattgttcatctaaattagattgttgattagtcttgccaccacttttaaataaatgttttaatgcatcacccgtatcatcagctgtatgtatcacatcatttattacatctgataaatcacctaacccaacatttaattcctttgcaaatgaaatcaaagtatcatttgcagtagttataacactctcagttgcattcaatgctaccataacagtatcatcaataactgcggttaacaaacaagcataagtaccaactgataattcaattatgaacattattaattcttcacttgcagtaatcattaaagtcagagttttcattaagccatgatttgcagattctatagatttagcaatcataagatttgaagcttttgatatataatgtgggaatgaaacaatatcagatgcgtatatatctattgaatcatataatgcatgagtttgagatttagcttgttctaatgaattaactaatgaatttaagaaaaataatagttttataatgaaaagcaataaaaatacagtatatggattcagcaatagttgtgttaatttctctttgaaattcaaatatggtcttctgtaatagtttgtctcaatggtagacggatgagtaaacgttgttgtcattagttgataataggggtataaagaatgcaattactcaaagaaagactgttagtaaagcattatcattatgttaaatctcatacatctgggtatatggtattgtaatactaatgattgtttaccagaggtattttacagttctacaaagatctaattattgcaaaaccatcatgttaacgttctgccaccaacatgaaacaagggtgagacaattcaaaaaactgattacgtaataaattattgatgattcacttaaattaaacttactgttaactcactttatcatcacagaagtactatataattgaggattatctataatttaaaaataaggttttgatgggaagtattaattaataacaactttaacgttttatagaaatcttagagaataatacataattaaatatctaaaccatcagttgaaccccaactgtaaatattccaacctaatgaacctgcttcatcaccataaagaagtttacattcatcacctcttgatgcacctgctgcaacaatagcaggtaaaagatgttcatttgtagggtgagcagctttatatatttctttccattctggatttcttggtaattgtttcaatgcctctaattgatcttcatgttttgtatcaagtaaaagtttatttataatttcatggaatggtttattataatgtaatggtttattacctaaagctctagccatatgatgatctcttaaattatgaactgacataccagagaataaaattgcaccatttaaatctctatatttacttaaagcttcacctaatctataatgaatttcaatatcagaagtacctgcaagtgaaacttgaattaatggtacttcaacatctaatttatttgaatctgcaatagttggatcaccaaaagcaacttttaaaggaacgaaaacaccatgatcaatacctctttcttgagttttagattggaaccaatctgattcttttaaagttttaacaatatcattggcaataaatttattgggaactgtatgaaattgagtttcataaaatcttttaggaaatccataataatcataaattaaaccattttcatcagatctaatttttttagaagttacagaattttgggtataccaagcttcaccaataccaggtaatgcaacttcaatttcatcgggtttagttgtttgccaatgagctgatacaactataataaaatcaggtttaactttattttgaatatatctaccaacttttttagttgtttcccaagcacctggattatcaagaccatcagcaaaatctggtccaccatgagagaaaaagaaaattggtaatggtttctttgatggagattcattaaatacgaaatgttcagattcagccatagttatatttttaatgttatcaattagtcttgtcgatgatttatttgcagaatttaaaattttataaaatatagacattaaaatgatgattaaagtaatgagaatatgactagtatttatatcaagattcatttattcaaccatttgatgtcaatgagaaatactgtctcaatttgaaccacaatttgtaattatttatactaaaaaaataatgaatcaaccacagtaataagagaattaataagagatcatcgattattaaagctgacaaactacggtgcacagcctgaaaggtttttttattgcgggatccaacactgccgacttttggaattattaattcaagtagtagatcatattatgtaatcaggtgatatttttgaatattatgcatgcatgttataaagcgtggcgcattattaaatttattattgggaggaagaattatggttaacttaatgataatggtatttgatgttatgttaagaatataaataaatattaaataaataatccgctaatataaagtaattgattgattaattaattaattaaagaaataaagttatagtattttgtacgataatactagtatctatcacctgtacctgccattggtgggaattcagtattatcagtatccagtacatgtttacatttacaccaatctctttccttatctggataactattcataattgatgcaatatgagatttttcaacagattttggtgtagttgatgtacttgtccatgaaactccattacataatggacaaaatgcagtatttgctgtatttgctgtatttgctgtatttgttgtatttgttgtattagaatctgatgtaactggaattgaaattggaatcgattttgattttgatgaactcatttgtgtattgttttatagaaaaaggaaagtaacttgttaatagtagaaatagtataaaaataatagtattcaaataagttgaaatgaaacaaatgaaaaaaggggaagtgttgtgatttttataatattttatttaatactaaaatactaaaatacccttagttacaccccacattttccagcaaatcatggaaagagacaccgttattgtaaaagtcacactatgaaaaaagcttaaataaaggcaacaaacagttgctccccggcgataaccttatctgtggggaaatttttgtggggtgggatatttatcggatagtgaatcatctccggggttgtaaattaagacagttaatcattttacggtgtattatcttttaattaaattatataagtattctctattcataaaccttagcctaagcattctcaatgatgacatctgcatcttcatctgcttcaacttcaaatgtaatatttggcattaaactactggtttctttattatttactggtacaattttttcaacaattctatcaactggaacaactttttcaataattctttctataactttttcaaccacaattggttcttgttttgatgcatcggttttatcttctaccttagcaacataaccttcttcttgttgtggaatatatgttggaccaacagtttcagtaatatcacccataccccaaaatgtcatcatacaaaggaaacctgttgcaattgcaacttctaaatctgccttattttcatcaattgttaattcataatcaaattttctttgtctcattaatctaacatgtgcaatacgttctctagtttcttcttcattaccacctggatttgtaattctttctaaaaatttactacctcttgtccaaacatatttatgaccatcattgagataaaaagttcttaatctacctgataaaccattttcagcttgcaaaactctatgttgtaaaccttgctttttatggaaatcaaaagattttaaaaagaaacctgctctaattgtaacaatttcatgtctattaggatatgtaaacattgaccaagttggagttgatgcactctctctttcaattgtataaatcttattacctttatgatcaaagatattaatttttgtttgtctacttttattatcccttctaatatgaacagattttgttggtactaaaggtacaaaatttgcatcagttgaatgtaaatcaattacaggtttaatatatgcatgttgaataaaatatgtagcaatagtaattaaagtactttgtacataaactgcaggagattcaaaaataggcattttaaaggtatttaaaagattttaaaaatttaattaataaatttagttaattggtaacaaaagaggttttgaaaaattaaaattattcagatccttgataaacgaaataaattaaaatagatgaaaagcaaagaaatagtaaagaaaagagtgtaaagtaaaagaatattagctgcaagggatacaagaaacaggttaacactcttaaaatgggtattcaagtgattaattgccttgttataaagagggaatatccctctttattcataaaccacaacaaagaaaatgtcgtggggggtataatttgatgattattattatgtaagcatctttcataggttcttacactataatgcatgcatggtgtaaagaacatgcatctacgatgggttactacgatgttcatatcatgatactgtacatacttcatctttatctataatgtattaaagttttttctctatgtagattaattatattatactagttgaatcgatttaaattaaattaaattaaattaaaaaatattccaagcatcttctgcaccatgacacattttactacaagcaacagatgctgataatggatattctgataaaccaattttctcatctatcatttcatcagcaaaattatctttacctcttgccattgcaccaacgaaaacacataaactttcatcatcatctaatgttttaatataatcttgtgatttaacaacttctgcatcgaatgataatgtaattttacgacatttagttggtaaatgatctgtaattggatttttaataacttttaataatttttcctcagaatcaacacttctaattgataattgatgaagtaattgaaccattaaacctgaaaatcttttaaatgttcttggaattctaactgatggattaacttcaattaaaacatttttagctgttaaaatatatacttgtaatttacccgctttatttactggcgaatctaataatgttaataaacattgatgtgtaatatctggtcttgcttctgaaatatcacgtcccatctttcttaataaaccttgatgatcatcacaatttaataaaacatatttattatgtcccggtccactactacttgtaactttttgtgtctctaaacacgcttgtgttagaactactattagcctttgtgtagttttatcattggaatttaatgcctttggttgttgtggaacgagtgatgcttcaggtacatctcttttaatcccacgttttttagcatttaatgcatctctctccttagaatcactaaccatttcctatatattaaccttactttttaaaagatcaatcaaagcaactatttatttgagttgataaatttaaagtgtgtaactgaaaaaaaaatttttattttcaaattcttattatcttaaaagtgcggtaccggtgttaagtaaattctaagtaatttggaactaaaagcacaatgctcagcttaaaggcttgtatattttatagcaaatcgaacaagtattagtgaatctgctcatgctattacgatgagtgataatgattcatttggagatgatgatgactttgattttgatacagtttataaagtagccgagaaggtccagcaattacaaaatacccaattacaaacccaattgaaatcacaaacgccaaaattaattcaaaataataacactaagcaaggcaataccaatgataaaagtatcaataatgatcaaatatatgaaattaagggagaaaatgcaattttgagaggtcaaattgctaaattacagaaagaacaaactgaattacaaaataaattaaaattagattttgatcaactattaaagaataaagatctgaatattgaatcattaactgatactataaataaattaaaatcagagaatgaatttttagtctcagagaataagaatttataccaatcaaatagtaaaaaaaggaaaataaagtcaaatgaatcgtatttggaatatgacacatcaaatggtaataattcaaataatttgatttcaacatcaacacaaaatacttcaggtattttatcaccgaagaacaatgatggtattaatgaggcattgaatattatttcagatgataatgtaaaagaagaagttaaagttatattgatgaatcaagctacttttttccaagatgaaaagacattatttatagaagcaatttcaaatttctccataccaggtatgaagaaaccaacattaaattatcttgaaaatattaattctacattcacttacattaatgaagatttcaaaatcttcaagaatgaaaatagttttaagtctgcaattttgaagtatttagtaaatttccaagaaaaaaatagaatagattatttattactaaattttatcaatatattagttgaatatattatgaaatgtgattttcaaaatgtggaaaatacacaattacttccagttccatatttactatctttgattaacttttcattaaattacaaacctaaagctataaatgatgtttttataggtaaagtaacagataatgtaattcaattattacttaatttccaagaactatttaaacctgaatttgactatttatcattaccaggctctagtcaaatgattaattttataaaactacaaaatgacagtgagaataatgaagtttttgattatttatttattgaaaaaacaatgcatatcaaaatacttgaagttttcagtgcaacttttcttatggatatattaacaaccataagtaaggttacatcatttcatatgtttacatttacaaattccaagagtagtatttatttttggaatatgatacctcaacaacttttcatcaacagtttcctttcaataaagacaccaattcattttatttatagtaccatcgtcatactgattaattctgttgttgatgatgataaatttgctttcaaaaatgcaggtaagagtaagggtaatacaaatgataatactgtcaaaatcttagaacatgtcatgcaatttttgttgaaattggaaccatctcaaatacaattgaatgtttatggattgaatagaatgattggtagcaataaccatttagaattattaaatataatttcaatcccatcaaatgaattatcatcacagcctaaaaccaattcatttgatacgtacaatagaatacttaatgaagatgataatgatttcaaagacttttcaaatcaggaattttatatattgaagacaaagatgttgattttggaattatttgaaaccttttattcaacattgataatgatttcattaccattgaatttaaatttgaacttaattcaaatattgtgccagttagtcggtgaagaacaagaaattatctatagaaattttagatcagttaataacaatttaaggattgaattaatttctaaatcaattaagatcatgcattatctaataacacaggaagaacaagttacaagcacaggattatctaattcaacattaagagaaatgataattgtaatgttaagaatattatccaacaatatgaaaaatatttctattgagttcattaccaatttgcgtaaaaatttaaaggtatatgatcttgtattcaacaagccattagagtttaaagaacatgataagtttggaacattaaataaaattttatctattgatcaaaataaaaacttaacagaggatgaaatcgatgaacttgtaaataatatgatacaaattgatattgattcatacaatggtattgaatttaattatcctgatgaaacaatctctctagctagagatattgttgaatcatcagttacagttgatgaagcggatagactacatgaaagtattaattacaatgatcaaaatttcaataacaacgatgtagatattgaaatgatgtataataattaaaggcaataaataagtatcaaaaactttctttctaatggttttttttataactggtttcttttaattgattagttttaacaaattacttaataatataaaaattatattcaaattatttaattttcagattggaaaccgttcttgaattttctagaaacgtattttaagtaagtcattctaccggtaccagtagttcttcttctctttgctttgttagcccagttgtattttctcattttagctgctgggtaaccacatgaagcacaagtcttcttttggttgtggaaagatctcttaccacatctcttacataaagtatgagatttaacgtgtttcttacctaaagatggagtaccttctgttggaaattaaaatgttagggggaaaatagttagttagtattttgctcatagtaaaatttttcgaatgaaaattcttcagaagtgtaagggagatatatttcaacaattgattactgataatttttgaggaaacttgatataatgtaaatactaatttgatgtaaaatgatatctgtaatattgtctttcaaatgaaacttaaataattaattcagtaataatacttttgtttacatgatagttatatgttatcgaaattgaacatttcaatcattggaatatgttcagtatttttgtaattttcaaatatatggtaacatctcaagctgataatatctcatgtacattctgtcgatatatgtgttatctagtggatactagtgctatatgtacgtactactcatattggttatgtatgataaataaaagaaggtaaaattagaagtaaaattattaataaatttctactataataattacaacaattgaagaaaatatttcatacactatactttcatcacccatacaattcgcactgagagggaggcaatttctgagagaaattattttttttctacggggagtgagtgtgtgtggtgtgagggggagcttcattttcatttattactgacaataaaatgtgttttgcgcgtcctttccaaattttcaataaattccaaatgttgtgaccgttaaatgttatagcttttgcacgtgacgagggtttagtttttgaaagagggtttggaaatcttttcaaattttcattttattttggtgttacgcgtctctctagtttgatacgcgtaattgtttacatgttttggtgtgttaaagacgtgtttaggtgggtgataatgtgttttgaaaataattttaaagaattgctctgaaaataccaaattattctaatatttatccttgaacactcatctctttgaataatcaaccaaatagcaatgaatattaattcacaattccctccttcttctcctttattggataatgaagaattagaggttggtaaaccttcaattattggtaattctaataaatctattcaacaatcaaatggttattttaccccagatccatcctcatcattaggtgatactacaattaatagtgatggcatgaaatcagataattacaattcagatggtcaaggtgataacgatattgataatgctgatggtggatctaatcatccagtttctgaagtttcatttgttaataataacgacattaatgaaccaatagccattgctgctgctcagcctacaattaataaaattgataaatctcaacctttaagccctaagaatttccataatgttattcatgttcctcttaatggcgatgttttcaaaattggtagatcaggtttatcatgcagtttcaaattaaattcaagtaataaattaatttcaagagttcatgctgaaattcattatgatcaatctgagagcttagtagttttgaaatgtgttggattcaatggtttgaatataacaattccacatcaaattggtgttagcaaacttgaagaaaaacaatacttaatctcaatcaatgataatattgatactgacgatgaagaatatattgcctcttcatcaagaattctaaacagaaattctacctttacaaatttttatatgttgaaaaatgaaactatcaaaatgcctttaattgaaggtgcagtattagatttcagaggtgagcttgcgctgttagttttcaataacaataaaataacaattgatccaaagactcaagttatttctaaaacatcaattactgcatctccaatcaaaaataaggcaagaaaactatccactggtgaattatctgatatcgtcaaacaaaagaaacttcaattctcaactcatccaactttaagtgaaattgaaagtagaaataaaaatagaaacacagatattaaatcacttaatgatgatgatacaaaatcaggtgctagacccgttccaaaatctgttttttcaaatacaattatttataaacgtccaactccaataaatacaccagttagaacaccagttaatattcatgttcatgatgataaagaaaatatcaatgttccagcaaaacctataaaagaaactaacaataaaccatcaattagagaaccattagctgaattaccagttaataacagttatatggataatacaccaccacctatttcatcacaagaaccatttatcacagaacacacacctacaccacaatcaataacgacacaattttcgattgatgaacaaataatgaataacatttcaaagaaaaatactgaatcaacctcaaatgaagaattgaaagaaaatcataataattatgctaatgaagaatcgaaaaagagaggtagaccaaagaaagcaaaacaatcagaagaggaaattttaaagaatatgccaggagaggaaattgattcaattttagcaacagtaccggaattagatgatatttctaacttaataaccaatcatattgcatattcaagagttttacaaacacctttcaaatcacttttagaattaaattctattaaaaagcatcaattaagtaaattacaattacgttgtgttttaattcattatattgattgtattggcgttattttcagaaagggtaaggatgcagcaggtaaacaattagatgaagaatactattatgttcctgaaaaggataatgatatccaaagagttcaattagtcgaagagctgaaaggatcatcttctcaattaagaagttgtagaaagactcataaacaatatttctggaaaaagccaaagatttaatctaatctgctctacattaattttccattatttaattcatcattttatttaagcattcaattatttctatgtatttattttttttgtattttgtattagtttttcatactctcttcttatcttatcaattacgattctgagaaactaaattttccggaggctcaacatgattcaaagtgagtcaaaaaaaaattatcacgtggaaacgcgcaatcggaggaagaaagcctgacatccacaagttactgtggaatcaaatcatacagagaagttacttatcaatcaattaaacacaccgtgataacagattgactacatgtgcatctcattgatcaatgaaataagattaataaactaattaattctggttaaatttgaatttcacatgctaaacgaaataaattttgaattcatgattaagatccgaagaagttgaaaaattatataatcgagccaacgttttttcctgtaatcgctacacagaaatctgatttgggttcatttaatcgagtgtactatgtaaatttaagttagcatatcttgatgcctaattcaattgaatctcgtagtattcttctcaataaaatgtaataatattgtagataaagctgtatagttgaaacagaaattatctgtatacgatctgtatacgagctatacgacgtagaaaaagctaatatttcaataaggaaagccaataaatttaaaatcgcacatgcaaaaaaaccaataaaatttttttcacattcatattttccaaagttttataagtagagagttgtttgcccaaaattttacgttttcaatactggagtttagaagcttacatttatctatattcttttgatttattttctattatcaagacttttcaagttcaattattactattacaatgtctactggtgaacactttttctttacgtatgtattcactcttcatattcgatgatattgatatttatcattattattgttattgttattgctattattattcaattataaaaaaatgtttcatgtgatcgaggttactaacataatatctacttattcttaaatagttctgaatccgttggtgaaggtcacccagataagatctgtgatcaagtttctgatgctatcttagatgcatgtttagctgttgatccattatccaaagttgcatgtgaaactgctgcaaagactggtatgattatggttttcggtgaaattactaccaaggctcaaattgatttccaaaaagttattagagatactattaaacatattggttatgactcatctgaaaaaggtttcgattacaagacttgtaatgttttagttgcaattgaacaacaatcttctgatattgctcaaggtttacattatgaaaaagctttagaagaattaggtgctggtgatcaaggtattatgtttggttacgcaactgatgaaactgatgaaaaattaccattaactattttattagctcacaaattaaatgctgctatggcagatgcaagaagaaatggtactttaccatggttaagaccagatactaagacccaagttaccattgagtataaacatgataatggtgctgttgttcctcttagagttgataccgttgttatctctgctcaacatgctgatactatctcaactgaaaatcttatttctgaattaaagaaacatatcatccaaaaagttatcccagaacacttattagatgataagaccatttaccacattcaaccatccggtagattcgtcattggtggtccacaaggtgacgctggtttaaccggtagaaagattattgttgatacttacggtggttggggtgctcacggtggtggtgctttctcaggtaaggatttctctaaggtcgatagatctgctgcttatgctgcaagatgggttgctaaatctttagttactgctggtttatgtagaagatgtttagttcaatgttcatatgctattggtgttgctgaaccattatctatctacattgattcatatggtacttctgaaaaatcatctgatgaattagttgcaattgttagaaagaactttgatttaagaccaggttgtttagtcaaggaattagacttagcaagaccaatttacttcaagactgcttcttacggtcatttcactaaccaagaaaatccatgggaacaaccaaaaaaattatcttactaaattaagtaatttgattttttgaaatcatcttttctattctagttcccattattttttaatacagattcaattaatcaaataaataaacttgattcaccgctcaactcgctgaacaaatgaaaactttaatgcaatacaattccctttttttccacattttactttctcttttttttcaaacctttctttttcacactcccatcactttgtataattcccccctttttatatattgtttgagattcaatgatggattgagtcatcaactggcatctttctgttaatatagattattaattaaaagttttttccaaaatcattattgtcatccgaaacatttcaggaattcccacgaaaaattgtaattcttcgatctttcgcattgtatcagtttcataatttttttaaaagaaggcaatgcttcatctttatccctacttgcatgtatactatacgttccttaacccatcaacttagccaataaaccttcaattaacaacaaacacaatgggccgaaataataaaaagtatttcttaaacatgaggaagaggggcaaaaagaaggaaataaaggaaaaagaaattaaacagtttcaagaacctcaaaataagttctttgttaacggtgaattcaatgtggaaaaactacagtatgttcaactaatggatgaaatggttgattttcctgaaaatgttgcagtcattggtatgctagttggaatttcacgacgaatactagatggcaataatccagagaaacaaagtagaacaccatatatttttcatatgacagattttacaatccctgcattcataccggcggattttttcaataatcgtaattttggtagaaaagaactacataatagaacatatgatattcgagtttttcagcctggctttgatagaatttgtagagttattaaaagagacttaaacccttttgtaagatattttaaattatacagtgatacagcttatcattgtgataaaaatggtgttcttgaaaggatcgaaaccatgagtcgtgaagatttacaatattattatctggataggtttaatatttggttagaattagaagcacaggtgtatttattcaaaggtgaaaaggaactgtcacatttaactcattttgtttatattccatcagaaaatctcgaagtttcattgaatcacattcatcaaaataagatttggctgatgtttaaggcagcttatgaaaaaactgggatgtttaaaaatatctttcaaaataacaatcaacggtttgaaactatagagattgatgatgatgacgatgactatgatgatcaatcatttgaatcggtaccaccgccatctaatctttttgcagatcatggtagtagtaattactcatataataacagcggtttaggcgaaagtactcaagtaatagataatactcaagcaaattcttcacctgaaaattatgacgtcccttcagtttcaaataatcaagtaaagaaaagacttagattcagtgatcaagtttatagcaatgatacacaacaaggtggtgatttctgggatcaagatgacggaagcggttccaatacggatgttgcagaaggaaccatgggttagcgatgatgatagttcagtagtttttaataatcaatcattgaaaaggaggaagactatacgttttgaaagttcatcatccgagtctgaagaggaagatgagatatcaatcgttaaaaatgaagtgaaaagagaagttaaagaagaaactgaagctaaaaatgagaatgagaatgaaagagaaatcgaaacagaagaagtagaaagggaaaacttagaagaaacattacaaaaagaggtacagcaagaatcaagacacaacgaaaaggagagcataacgaatgctgttcaagtaaatggtgtagatgtaaacggaacaagccagcctgatattttggcagaggaagaaacaacactggaggaagaagaagagcaggcgaatgaagaacctgatttaaatgaaaagattgaacatgttcaaaaagagaacaaacaacaagttaatcaagttggaaactcaaacgtcagcaatgctgtatctattgtgaacaacaaggaacaagtgacgtacaatagcaatgagcgtattaatgaaactaagttaataaatgataagcaatcaaatgataaaaaagatgaagtaataaaagaaaatttacgtgttgatgaaaatataccatcacaactaatgacacatgagattagttcaacatcaaaagagagtgaagaaagcaacgagaatgaaaacgaaaatgaaaacgaaaatgaaaacgaaaatgataatagtaatcatgaaaacaacgaaaacaacacacaacaagatgtagagttgatgaatcgtctaggaagaaaaagatttgagaatattgaatacaaattactaactgagttgagctatcttgattttagatatcaaccacaatatgttatcgttaagaatattgagattgtgacggaatttcaaaattacatttatattattagtgagactgaaacaagatataagagaatcaaattacgaattaaggatgaaaataataatacgttagtaatttatgttcaaaacgacgatttattgaaatttttacaaattgatgatagaggatactccttttttgatgatattgaagacactattaaggagaagattaaaaataagtataaagatggaaaagaagaatattttggtatgattatttcagccaaagaagtctttcctaacattaggaaatggttttgggaatatagcagtgagcggaaaattgaggagtagacatactagattcatagaaaacatgtttaaaccaaatttccgaggcgaagagattacgtaatctgagtgattgtgaaaatttcaagcctctcacgaaatattatcttatttaatttttttggcggcacaacccccacagtctgcgaagagagaagcggaaagtgggtgggccctgcactagagacacgtgttaaggggagaaattttatttactgggagatattcccagtaaaggcgagatagcggaaaatagagggaaacgtatcggtttgaagtatcgcgcatttcccatttctgacgatttttttctattctctcatatttttcacaattcctattattttcaccagaatttcattgttttcgaatttgccactgagaatattaatattgttcgtggagacgattactcagttgatgaattgattaattgattgtgtattgcgctgttgacttcactttatccgcatatttattgtactgccaaactattacacctcattgcaatcattcaaactaactttgctactttaaaataaagctgacattgaattttttatcaacttttccattaactagagctcaattttgttgacttttttattcagtatctagactgttcaattttttgttatttttttactaaaattgtaaacaatctaagaccaattataattcactattcaaacattacccatttttcataaaaatatcatatcaatttcaatattgcatcatataattattatagaaaacttatcaaacttatagaataaaattaaaaaatgacatttaatcaacaaacagaatcgttcgaatatattaatagattgaataataattattcttttcaagatgtcaatcaaaattttatgaataatgctaatattatcaataattcagatttaatttctcaacaacaatctcaaagtaggatgaatttaggctcagcgtcaaatggtaatttatcatcacaatttgcaagctctttaaatatttctccttttgactcacaatcaaatcaacaacaacagtatcttttacaattacaaattcaagaagctcaagctcaagttcaagcgcagcaagcacaacaagcacaatttcaaaataattcattatcacaacagaaaagagcttactctgttgcttatcctctttataatcaaccatttggaaatagtttgtccaataatgaaatgtttttaccttcacaattttcaaataatttaccaaatcaaattaatgattttaatttagcttcacataatacttccattggctctataaataatgatttattaaattctaattcaaaagctggtttgagtagtcaaacaattcaagaagttccagaagacacatttcaatcacaattattacctttacaaaagcaacaacaacaacaacaacaacaacaacaacatttacaacaattacaactacaacaacaaattcaaagtaggaatccaagtatagctgataatacaaatattaataataatggtattactaatgtttctaatgttagtgctaatattgctaactctaattttaatttaccggtcgaactgcaaggtggcgtcaataatatatttaatagaagacctagttatgccgctgatgttcaagctaatcaaagaaacaatttagagagtaatttgatgcataataaaataaatttaaaacaatacgctttacaatataatcatttaaataataaaagaaatacaatttacgaaaatccaagaggcagtattgatcaatctaccagctttaaccctcttaataatactagtcaagcaaagggtcaaaatatgcattcttttagctcaatttcatctcattcctcttcaaattcatcattgccactgagtggtaatcttgatagtatgaatattaatagaagtatttctgatcttgatacaatttatgttaaattagacgatggtttattattaaataaggcaacaaatactattatcacatctcctgaattgaaaagggaatttgaaaaatgctcgatttattttggtagttttgatattgcaatgaatgttgttgatcaattaaacaatttattaaattcatctccagttgataataataatgaattcttaaacaatacagagttaattatagtacaacatagaattaataaattgctggattttttgttagagcaaaatgaagatttaaaatcgtcaaatcatatgggtaataaaaattattcactaattttaaataagaatggtagattggatattatttctttccctaaaaattctaatttacaattaatgcaaaaagatttaataattattgaaggtgacaggggtaaagatttagttatggttttaaaaccaatcattgaatttagatttgcattatttttcaattatttgaaaaagaaattacacttgaaaagtttagagtttggtactgatattaatcgtaacaataacaataacaataataacaacagtagcaataataatgcaaatgataaaagtagaaattttaataagaataataatcaatcacaacaaaaatctattattaatgaggatgaaaatttcatcactctgccaaataaacaaattttaagatttgcgaaacctcatgaattaagtcaattaattctcaaatataatgatgaaattatggcatatagaatttgtcttaattattcagcgtctcttaacttaaacttgattattaaaaatgttgaatttcaatttgataaaaagaaacttattatttactattattgtttacaacgtttagactttagaggtctgattaaagaattgttcaagatctataaaacaagaatttggttatgtgctattttaccattagaaaaaagttttagacctttattagattatgaattagaaaaacgcaatatcaaacttgataacgttgatgaattaatatcaccttatttaataaccaaattgaagtctaattcaagttcaatctcaactgatagtatgattgatccattaactattccaaactcaaataccaaatcaaattctgcaattgataatcttaccccaccttctacagcttcttcaaatgtcaacggaagtttaactgtttcatatagatcaaataccaatgtcgtaaatgataaatttccaatatctgatcaaatttatcaatttaatgaaatcaatgatccaatctatttccactgcaaaatcttttccaatttaataaagatgttttgttttgaaatatcaaataaagatttattctctgatcgttattggttcttggatgatgaatctacagcttaatcttttttttctcctgtctttactttttttcagcttgttataaaatacaatacattacattacattataaaataaatcaaaattaaaacaaatatacatacatctctttactttacaaaaaaatcaattaatgatactttcctgaataaaatataactttcgttaacttcaactatatatcactgaatatttgttttctttttttttcttttcttaactttactttacactactttcctttcctttactttacttacttccaccttacttaattcagttttacattacttttcttttctaccaacagtaatctgttattttttagctatttttattatttccgttagaattatatatcaaagctttttttctctataaaatataaaatatacatttcgattattattataaacagagttcaagtttttctagtatacaattaatcaatttaatctaatcagtctcttctgattacatagtcactgcaccattcattatcagcaacttgatctatcgtagctctcttgtttctctttgttaataatgatttgacaatttgtttagcaagtttataactttcactattttcattctttattgtataccaagtccaggaaatcattgcaattctatgagatggttttgaagtcctcgtatttgatttaattttttcatttggtaattgatcaaatggtaatctactttcaagaattgtatataatacaacacctaaagaccaacaatcattttgtttaccatcatatggcatacctaataataattcaggtgatacataatcctctgatccacatctagttgataacattggatcattaggatcaatttctttacttaatccgaaatctgataatacaacaattggtaaattactttttgtgtattcaataccatttaataataaatctaattgattatatttgagtaaaatattttccaatttaatgtcacgatgacatatatttttatgatgcatgtaatatattgctgaaacaatatttgaaaaaatacatgctattaaatgaattgacattgatgatctatgttctaatacaaatgagaataaatctcctcctttacaataatccattgccataataattctatcgataggtttttgagaggattcattatcattaatataatctgatcctaataattgaataatatttggatgtttaagagttttcaatatagttaattctctagttaatgaattttgaattcttaaccttaattcttctgaattttcagttgatttattaaaattaacatcagtaactttaattgcggttttggagtcatttgcaagataaactttactaaatgcaccagcaccaacttcataagatatattccaatgttgaattcttttactctcatctatactatacgttgtaaaatgtaatgaatgtactggtagttcttccttttcactagattcaggtatatcactagttttataatgtctttcaatatttattaaattttcatgtgtatcgattttatgaacgggtaatgaaactacacgatcaacgggtttaatatttgataaatgaggaggtttttgaaatgatctaagatgatgttgttgctgtgaaatgttttcaaatatattcatttgtaattgttgatcagaaatctcatttatatctcttatcttataatctgatataaatctctgattttgatttgagtattttttaccttcatcatttgttgtattattacttgttaatgataaattattagtttcaactaatatattccgccttgaatgtgattgctgtctagttttagggattctcaaagcagatgatgagttgtgatttgtattaggaattattggacttaacttgcccttatcttccaaattgataaaatccttcttccctgaagtttcttcaaccggactaccaaaaaaatacggcttttcccttctggtattataattattaggtgcaattggtgtaggtaagttctgtatatcatcatatcttgttgaattattgttattattgttactgttattgttattgcttacattagacatatgtaattccgaaaacgtcgtacctgtctgcattggcggagttttataatcatacaaagtcggactcaacacacttgatggctgttcaaatgtgaaattatcactatttacatcatcattgatatgcttcatatcactgttaatactgtaatctgtagtcattgatcctctagagttaatatatcggttcaattcatgttgatcatctatgttttgatccaaaagttgttcactcattcttactagcttgacatctatcagtccgataccctatatccagatgaaaagaaccctattcttcaaagaaacccccaagaaaagaccaagaaaataaactctaaatatatacctggtaacagccattttctgcaattgctctcccacaacaagtaaaagtgtcgcaactaataatgggaatacgcacagagtgaaaaataaatattgctagagattaagttaagttaagttcagttaagtaagttacaagtttaacatccttttgggcaggtagcaacgagttagttcacgtcacactgggtgtcctgttgaataatatcatggatgttgtagaacagtcaagaatgggggacagtaatttgaatacctcaatcagaaatgatcctcctcccatcccgcacataactgctaatatgattcctttgaatgtggttttagagagaatatcattagatgcctataataagataagagagtatttcaaatttatggaatcgggaacacaatctgatgttgaaaagaagagacaactgttagaacttctagtttcaattagggaaaatttcctaagattatacgttatttctaaatggtccaaaaatcataaagagataagtaaattaattgatatatttgcatggttacgtgaacaaaatcaagcaattatcaatactataatgtcatttggtgctattaaatcatctcttataggagctaaattacctgaaccagatttaatgacatctttagaagttttattaacgggtagacctaacttaccaacttataattatttagatgaagaaaataatttatcaccagaatttgtattgaaaatattgaaaaatttgaatgttgaattatcaattaaaatgtcaagacaagaaataatacccaaccattttaaaaactattcaattaaagatggttgtatttattttaatataccaggtgaatattcatgttctttatcattattaagcgataatcatttccatttgactgattttaatttaggatttacattagattcaaattcaattataacttctaaaaaaccatcattaaatttaatagataagaaatcaatatttgcaattgaaaaattaggaaatcaaatattatctgaatctgatgatttgcaaaaattggataatttactgttcaactttgcagtcactagaaaaattcatctattacacaaacaattaattgaattacgtatgggaatttggagaggtcatttaacacatacgtataatcctgaattatcatcaatggttataacatattgggttcaaaggaaatatgcaaaaccttcaacgattcatattgaaaaatcaaaaaatgataatggtgatatagatatttcaattaaatggtttatggatggtgaattggttgaagatcatgatttttatttgataaattcattcataactgatgtaaatgatccaaattatggaaaaattgatcttattggtactataaaacatattattaaatatcatataaaaatgatagttttgaaattaaaggaaaatttgataaaatctgttgaagatactgataaaatgattatattatctgaaaagtgtgataaacttacttttaaaatttcacaatttaaacaaattatattcaatatagacttattaagtggatcttgcttttttgagaatcctaccaatacaatgaatagaagctcttataaaattaacgtaggtaatagtttagattatattgaaattctaaaattgaaaatgtcaattcaagaatctgaattttcttccatgatgaatgcaacaagctggattaatttaaaatctgttagattgactaatgatgaaataccaaagctaaatattaattattctaatttgaaagataaaagtttagcaagtgttctatctacttttgaactgtataagaggaaagactggccaattggttggacattaattgtcggtcattttggatttcaatctaatgttcaaatatggtgtgctaaaattgaatctgttgaaggtcaatggattatcaaatggttcactaaaatataccttgatgaaataacagaatcatttgaagatattgcatctacaaataagcttgaaagtagtgattcaactgatgtagatgatattagtagtgatttgagtatcaaagttgaaaacagagttcataaacgaaaagatactgaaattgagaatattaattcaaagaaactttcatatgatgatttactaaaattaatcaagatatcaagttctaaattgatttccaatttaatcgttaaagaactgaaggatcaaggatgtcaattaaaggtcttgaactcaaatgatatactggttaaacagtttttaacatcaaatttttatattgatgatatagataatgcaacttcagataatgctattctattaataaagaataaatctctatttcatatacaaaatgcaaaagattctcttgttttattgatatcaattaaaaataatgaattaaatgcaaaaatatttggtaagttacttgatgataatagttttgaaaatgtacctgatataaaatacaaagatgataatcttacagctattgaatataattcaaaaactaaaatatttaaagtagaatcagatgttgatttatcaaatcagtttcaatcatcaatgaataatgttattgattcaagaaatagtttgtttttcagtgggtttgatatagtaaatccagataatttaattttatcaaatattttatcatttttgaaaaaatttgcaagatcattaaatttaatcaaactagttagtaataatccatctttgaaaattatcaaagtattatctgacggtatacaattcaaatacggtgccgatgacagtgagaccattacattaaagatttccccaaatactgataaaaacattattattgaatttccagagaataatctacaaatacaatactctgattatttaaataaggtgatatctaatggtgatattaccaatctaactatcaaagaacttgtattatatttaacattgacattggagtattgcaaaaagattcaagatctctccaatagagttggaaatatgatggaacttttcaagaaacagaatgaactggttgatttggagagtaatcctgaattatttaagtatacaccaaattttggttatattccttatgttttcaaccttgataatttaagaatatcttactttaagatgatcaaaattgaaactatatcaactggtacgaaaaagaaagctaataaaataatcgatgatgttttcagatttcaacttcgtattgaacttcgtcataaactgaataaggtatccaaattatattccaaatatttcatttcattaggtgatattaggacaaacaccacggatgtaattacatcaactgaaacaattaattcaatttgtggaaccaacccaacctcattacataaattaacgcaaaatgttacttcattgctgaccaaatatttcagcggagaagattttccacaagatttattgaaacaggagactgatgcagctactggtaaaactgcatctaaaggtagtgttgtgtttttacaagatggaatctgctgtgattttgatagtatttcatatgtgttggaagatttacatacaaggttatattcattgatgtcaacaccataaatcaaattttcatagaaaaaaaactatatagaaggtccctaaattatagaatatatatgtaattattaaaacaaatttgtaactattactaattgtaaaactataactatatataatgattccagagataatgaatgtcaaatttaaaataactttaaattttgcgatattgaaaattgtttatttacatgaatattctttatctttaaactttggcataattacaacctttccaacaaccaacctatattgtatatacctaccatgcgtggtgttgaagagatacccagagggcgaagtgctaatatatacttttcttcattgtatcaagcaaatccaactttgaatagtggaaaaacttctcaaaataatagaggaaatgaaagatcaggaacaccgaatgaagataatcataatggagattatgaagacaaacctaataaacgtaaaagagtcaattataatatacagcaaatacaagcggaacagtttcttacaggtaaaaccaaggctaaatcactgagtgaagaatttgaaagtgaatatgtagatttaaccaatggatcagaaaataataatatatcaatagctgaactacgaagggctacgagaagatttgatgaattaaatagagagaactataatgaaaatataaaaattgaaataccaaagagtgttacaggattagtggtgaaaagaaatacgacaccttctccagctgtgaaaaggtttataatatcgaagaaaacatggaataactatctcgacgaattgaacaaatcggacattaaactaataactacgggaagtgggccattagaagtgaaacctaatgcacttcaacttgaaaaattatgtacaatttgtggaggtgttagttatagttcatgtattaaatgtaaattaagggtatgttcagttaaatgtcaacatattcatgatgaaactcgttgtacccatttttcataaaaagacagttaattaatgttatatattagatatagataaaatatgatttgaattaaacagttgtaaataaggtccaaacacctttaagataaccaataatttcatcaccacctaatttagaatcaccataaattctatcaacaaatgaaattggaacttctgcaatagtaaagtttaaagctctagctctaaccatcatttccatttggaaaacgtaacccttagatttagttgcttcaataattttagctaaaacatcttttttgtataatctgaaagaacctgttaaatcagagacatttggtcttaaaacaacagtagctaagaaattagcacctcttgaaataagttttctctttaaatcccaaccatagacaccaccattacctgcatatctagtaccggtaacaatatcgtaattaccttccttttgtttctttataaactcaggaattgcttcaggatgatgagagaaatctgcatccataataataacgaaattacccgttacaaattttaaaccatgcatataagcagtaccaagacctaatttacctgcacgaggtctcaattgaatatgttctggaccatatactttgataagttgttttgcaacgtcttgagtaccatctggggaagcatcatcaacaataacaacttcccaatcaagtttattttccttgaatgtctttgcaattaaataagttataattggaagattttccttttcattataagttggaagaataacggaatacttatcgccagccatggttgtctgttgaacaaatgaaataatataccaacatccttaaagcaaagagaccacgtcgtttcactcattaaaatttaaacacgcacttcttcgtgacgagttgtacaacttcactggatgcaagtttaccccatctttttctgaggaagaactgggttaatatctacagtagggaatacatatagagcaatggcggtagatagttacattaagaggatgtttggtgaaaaatcatcccagtttgcagatgctaaagtgcttttaatcggtgcaggtggtataggatgtgaattattgaaagatctcataatgatgaatattggtgaaattcatgtcttagatttagatacaattgatttgtctaatcttaatagacaattcttattcagacataaagatatcaaacaatcaaaatcaaagactgcaattgcagctgttgagtttttcaactataaatcaaaattatatgcttatcatggtagtgtgttagataccaatttattcccactttcattctttaaacagtttaacattatttacaatgctttagataacttagaggctagattttacatgaatagaatgtgtctatatttgaatatcccattatatgaaagtggtacaacaggattaaaaggtcaagttcaacctatttatccatatctcacagaatgtttcagttgtgtccccaaggaaactcctaaaacttttcctgtttgtacaattagatctacaccttctaaacctgttcactgtataacatgggctaaagatttcttattttcacaacttttcagtaatgaagatactaatactcaagaaattgatgcatctgaatttactaatgaggaagaagctgaagcttcaaagaaggaagttaatgaattggctgatttaaagaaaattatagcaaacgaaggtgacaacgaaatagtcattaaaatttttgaaaaaatatttattgctgatattgaacgtttgctgaaaattgaagaactttggaaatctagggagaaaccttcatttgaaccaattaaagattatgatcatttcttcaaagatataaataaagaatatttaacaacttgtaaagatcaatcaacattagaagaaattcttaaaacttttgaatcatcattattaagattaactgaacgtttcaaaaataatgaaaatattgaatttgataaagatgatgaagatactttattttttgttatgtcagcatcaaatatcagatcattaatatttaatattccaacaaagaatgaatttgatgttaaacaaattgcaggtaacattatacctgcagttgcaacaactaatgcaataatggcaggattttctgctctttcaagtgtgaattattttcttgagaatgataatataaatagagttgctaaatctaaaatggttttcgattcttcatcaactgataaagttgttaattcatcaaaacttatcaaacctaatccatcgtgtagtgcatgctctatagttaaaggtataataacaattgatttatcctcaacaacattaggacaattaagggataaacttattgaaaaatataactatggagatgatgttgaaataatgacattagattcaagattattgtatgattttgatttagaggataatcttggagaaaaattaacaaattttataaatgatcaaacagttttattaattaatgattctgatgagaaatttgatttaattgagttatatgttttaaattcaccaaattctgagataatattgcctgaattaaatgtacctttgaaaaagattaaacctagtgaaaatgaaaatgatgaaaatgacgatgatgataaacttttggttgataatgaaaagaacaacgatgataaagtaactgtttcacttgacgatgatgatgatttagttgaagaacaaccaccaatgaaaaagaggaaaatttgagaatcatgataatcaaatcattatttgtataaaaaaaattgtataaacaaacttaatagattatagaaaatttaaaacttattaaactaaatactatattacaccaaattaattgacaattttacttataaaaatacactgaaccaaatgaaaaaaactcattgtttctttggagttttaggtttgaatttttctaaccaatttttcttttcctttgtatctgattttttaaagaatgaagaaactggtgatttcattggtatactatttaaattattattaattttaccattttcattactgtcaacttcttttttttcaaaacttgcataactattaccacccatagaatcttggggtgttgcagttttaggaagatgaaagtcatcattattatcagtaatactataattattatcactatcagattttaatactttataagatttgaattcctttgtatcaataactccaacatttgattcgcttgtatcttcagttttttcattattcattgatggctgaaatgaaaatgctaatgaatttgatgattttgttatattttcactattactttcggtatcaatatcagcttctgcatctatgaagtggtcttcctcacttttttgatcatcttgactttcttcgattgtagtattattattagtattattattagtattattatcaatctcatttactgaaaatgtttgagcaattggagttataggagttggagtttcatcattcatatattctggaattggagcaatacttttttcatcattattaggtggtaatcctaattctttagccagttgatcctcagatataacaactatactttccatattagtatcagtattatcggtattattaatattaattgatgaagaaattaaattacttcttgaggaaacaatggagcttgtaccactttgatttgatgtaattctacttaatgaggtttcatctttagtatttaataaattatctgtattaaataatgggattctgaccatttcagtatgtggagcttgtgataatgatttactatgaggccttgatctatttgcctttggacttgaaaatgaagttgttggagcttcaaaatcagaataatctaatacatttgttcgataatccaatggtgtaatcatatttttcagtggtgaattttcctttgaagatgatgtgaatggtaagatacgtaaatcatccttagattccactaatactgatttcctctttgaagaacttccaattgataatgtatccatcgtatcatttatatcttgttcatttgaagggtttatctgtattattggtttctctattttttctttctttgtttcctctttcttaacattttgatcattttgatcattttgaacattagttaatattttatgagaataagtaatcattgattcaattactaaactattaataatataagcatcaggattcatatcatctttgggatgaaataatattgaaggttgaaaaattgaagctaaatttttagcaggcattcgattaaattctgacttcaaattaaacattgcaagcatatctaataaataaaataatacacgcctttgaattggaggtaatttctcaaataatattgcaaattctttaagtaattgtttcctttgatgtataattaattttcttttcggtttatcctttttcaaagcttcttttaaacttgccgagttttttgtatcattttctttaaaatattgtaatagttcattcttttcaatcagtaattgtctaaaagaatcatataagttaaatggaattaaaggttcatttaaagaacctaaatatcttcttaaaattgaggcagcatcatgaactgtataaccttcccaatcaattttagctccataatcaggaggagttgaaaatatcaattgtaattgtttaattctacgatttgaaccagctaatctgaaaattccttcaacttgtaatgcatttgcctttaaataagaaccacaagatactataactaatggtactttaccataagttacattaagttcttttgataaactagtattggggagtggtatattgttgttaatattattttgaatgtctgaagagatataaatagtaccaaaagcatgttttgttgaagtttcaatatcacaaccaaaaatatttgaattaccaattgtatcttgatgtttttgttgtaagaaagaatccctatgagatcttaaatctttatgttttatattttgttgttcattaatgggtatagttgtattagatgataaagaattagaatctaaaaattgggataaaggtctaaatgaatgtgatgatcttgatttaaatcccagtaaaggtcttgaaggtgttggtgatgatgataattttggaggtgtttgattattaaattgttgagattgcgaaggggtatgagattgagattgaggttgagaagaggggagtaactgagaagattgtgaatgagattttgaaggtgataagaaatttaaagatattgcattactatttttcctacttgaatttgatattttaattggagttggacttaatatgggagtagttgaatcatctatttctatcttaggagcatcattagagttatttatttgttgagatgaagtattgataatattattgctattattagttgtagtagcagattgagaatttgaagaaggtgaagttgttgtatcatgtttacctaaacttctaaaccaacctgagattggattcttagagggagacccgttactgggagaagtcatgtgtgttgtagatatttaaataaaatatggaagagatatctaaaagaaaggcaatgtgcattaaaatagataatcaatataaaaaatatcaaagcttgtattacacgaacagaaacacgaattatttattagttttaaaattaaataattcgtgttacgtaattaagtatattacgtaatagaaatagataatatagaatatttattacgtatggtgtacaggttattactattttgcattacgtaataataagttatttaatggctcgtcgcgtctacattgtttgactgggttttacataatcagaatattaatattaatatcatgtaaattatattatgagaattagaatgcaattaatgcaggaggctgatcattaattaattaattgtattgtattgattcttcatattctctatacattaacacaaacataaacaaaccacaagatgagttttaaaggtttccaaaaggcaatcgtacgtgcccctcaaaactttcgtcagaaactgaatatgggtacagttactgaagatgccgtttatactgatgctgaacgtagatttaaagaattagaaagtgaaacaaagagattatctgatgaatcaaagagatatcataaagctgttaatgatatgttagatcatcaattaggtttttcaaaggcaattgaagaaatttataaaccaatttctggtagaatgtctgatccaaattcttcaatacctgaaggtaatcctgaaggtattgaagcttgtgaacaatatcgtgatgttgttaatgaattaaaggaaactttaaaacctgatttagaattaattgaatcaagaattgttgaacctgctcaagaattattaaaaattattcaatcaattagaaaaatgtcagttaaaagacatcataaacaactggatttagatagacatcaaaattctcttgcaaaatatcaaaataaaaaggaaagaaatgctaaagatgaagaaaaagtttataaatatgaaaatgatgttgcaattgctcaacaagaatttgattattataatgaaatgatgaaaactgaattaccaatattatttcaacttgaagctgaaatggttaaacctttatttatttctctttattatatgcaattaaatgttttctatactttagcttcaaggatggaagaaatgaaaataccttattttgatttatcttcagatattgttgaagctttccatgcaaagagaggtgatattgaggaaagagctgatgcaattggaattactaattttaaactgggtcatgcaaaggcaaaacttgattatacaagaagaagattcgaaatgcaaaatgctggaaatactccaggtagtccttatgatagtggaactccaacttattcaccaccttcatatggtggaccacctgcaagtactgctgcttatactccaacaactgcaacttcttatggttctgcttataccccaccaacaactgcaactacaggttatggagatgcttatggtgttaatactagtataaatgaaaaggaaggagggtatcctggttatggagctactccagctgctgcacctgctgctgctgctgctcctccatacggtgcagctccagcttatggaaatactccatttagctaatgttgcaccagtaccatctgcaccaccagcagttgcacctgctgcagcatcggaaacttgtacagcattatatgattatacagctcaagcagctggtgatttaacattccgtgcaggtgatcaaattacaattgttcaacgtacagctgatcaaaatggttggtggactggggaacttaatggtcttcgcggtgtattccctggtaactatgtaaatcttaactgattaactactactagtttataatattatgtatgtttagtaagtaaaaaaaaactaataatgtcacgatattttgcagagtttatagatttaacaaattcaaagagagatgatgaaaatttcattgtaactatcaaattgtttcaataatacattacctaaaacaacaaataatatttcaaaattattctataatcctaatgtaaaggaacctacatataggaaatcaaaagtgactagagttatagcacctgaatatttagtacaatttggtgatattgtacgacgtcatgttaataataataatttaaaaataattgataacgaagaatgtgaatcatgaattaccaaaatttaataaaaagataataggaagacatggaattgtcattgcaggctgataaattagatgataataatgaaattacaacacagttatgtattttatttgtaccatggggtgaatatgatgaattaaatggttatataccaattggtgaatgtaaagaatggaaaaaattaagtgaatggatgggaaaaattaaagttgattcaattaattatgagattccccaagataaaggtgtttgggattagaagatgtggtagattacgtagtaaatgaaaaggtatattacaataagtgtaactaaatgtcttgtcgaaaatgaccgaaagagtcagagcttagctcatcaaacggagatacacgactagtagagaaaaattattatttcaacacacacgtaccggggagaaaaccccatgacgatgaacattcgaacataaacagttaatttccattaaatggggttcatgtgacgtccatgttgtcgatgcttaaaagaagaagataatgactagtgtacaatattgaagatttctcaactaatactgctatgaaaaaatttgttcatcgcgtagtaaaaagggtaacgaagagggtatatcaggactctcttgttttattcattaaagtagtagacatgcatataaaaaagtatagaaaacaattatatcttctgtattcaaattatataaataagtgagatgagttaaaccaacatcagtgcatacatcacaatgattatataattggaattaatttcaatacctttgaaacatcaattattaactattcattaactccataagttatatctttttacctgttgatttataaataactccaactggagtataaagctgttcaattaatccaaaacctatcataaaatgtaatacccactcaataccaataccacgaaacttaaaaatacataatggtggagtatcctttttcattggtttcatccataatgaagctagtgatttatatgaattaactctttttttgatttgtcctaatacccaattaatagctttatgtaatattcgtaataatgcacctaaatgtggtaaggataaagtttctgcaatagtcaaaaatcctttctctactaaagttgatggggcttcgccatttttattcaatatatatgacatttcatctgatgataattcattaccatatttagatttaaaggtatcttgtggtataagtatttcaatatcagagtttgatattgtggctggaatggaaatgaggatattatttagtaataaagtttcaatttcagcatcacatcttgatatattatcttcaaaggcagcatatagatgttcctttgtacatatgtgaggatacttaggctactatacgtgctgatcgtgaagcagaacgaaagtgtgggaacagggtacgagtctctttgataatttggtccactatctccgacatagttagataaaaaaaggaccaccacagtgttggtaaattgctcaatgtgtagattattttaattattaatcaatcttcattttttcttttctcaatgacaaatcattatcaatttgacgtttcaatgtcctgtagtggatgttcaggtgcagtggaaagagctttatctaaattagaaggtgttacatcagttaaaactgatttaaaatcacaaactgttgatgttgaaactaccccggaagttgagttcgaaacagtgcaagcgaaaattgcaaagactggtaaaaccattaacggtggtagaactttataatgattaatgatataaacttttcagttgtgtatagttctttattttatatagtatttaatagactgaatctctaatgggccaacatagactggaagaccctttattgtcacttgtttgtggaggtgccgctggtgcattatctcgtactgcagtttcaccatttgagagagtgaaagttttatttcaagtacagggtaaatcaggatataataatggtactatggctacagtggtgcagctttataaggaagaaggttggagaggtatgtttagaggtaatggtgttaattgtgtacgtattgtaccatatactgcaattcaatatgcagtttatgaaagaattaaacttttcgttggtggtgaaatgactccattagttaaaattggtgctggtcttatagcaggtacagcatcggttttaggtacatatccattagatcttgtcaagacacgtttaagtgttttaactgctcaaaaacttgatattaaaaatacgaaagcttcattaacattacatggaactttaatgaatatttatcataatgaaggtggaatattagcactttatagaggtatagtaccaacagtacttggagttgcaccatatgttgctattaactttgcattatttgaatatttatcagaaagagttcaagaaaatataaataaaaaaccttcaactttagttgttcttttattaggtgcattttcaggaggagtggcacaaactatggcatatccatttgatatgttacgtcgtaggtttcaaatagctacaataccgtcatcaccattcaaatataagagtacaattgatgcattacaacagattgtacgacgcgacggcttgaagggcctttatagaggttggggggcgaatatgtggaaaattatgccttcgatggcagttcaatgggcttcttatgattttcttaagaaagtgttataatgaatatagtgtaataatattaattaaagtaaatagaattctgtaaaaataatagaaatatgacaatggatatttcatttgaagatacaacattaagggatgaattattgacaaaattacttactttgagagagagtaatcgtcaatataaggagaaattatgggaaagcgtatctgcgctgagtgatgtatcatcacatgctaaagaagcaccacagagtgttagttatgaggaatctcttacgaatgaacaattgaaaagtcttttacatgaatcaagaaaatataataataaattaatggaaacaattgaagaatatgaggattcattacaaactatacttaacgcactggtagaggcaaatacatcagcaactactagtgtgattgactcaattgatgtgaaggataattcatcagagcaagaaatgtgggattcatggtttgatctggttaatgttttgaatggaatcatgaagccctcgtctcatgatattgattgaacttgcagattaaattttttcgtgttttcttaactttgattgttttcttttcaatcaacaaacacgttaaaatataacaaaatggaagaaacaacatacgcacctccaacggtcccaaatccaccaccattacatacatatactgattattccccaattccatcatctatacttaattcagagaaaccaacaactattgttttcggaattgatgaagcaggtcgtggtccaattattggtccaatggtttatgcactagcttattgtacactagaatttgcaatggaagaactacccaatcttgaatttgcagactccaaacaattaacagaaccaaagagatgggaactaatgaaacatattgttgaaaaggaggaaatacaaataggttatgcagttacatctctttcacctaatgatatatcagtatctatgttaagatcttcaaatgtgattaatcttaatgaacaagcacatagtgcaacaattgatttaataagaactgtaatggagaaaataagagcagttaatccagaaacaaaatttgatgctgtttatattgatacagttggaccacctgcttcatatactactaaactgagaaaattctttacagttgaacaaataaataagattgttgttgaaaagaaagctgatgatacatatccaattgtatcagcagcaagtgtggttgctaaagttacaagagattggtcagttaaatgttcagctgaaataattggagctacatgggggtcaggttatccatcagatcctaaaaccaaggcatatatcaattctaatattcatccatggtatggatgggatgaaaatattcgatattcatggggtacagctaagactgcattggagaatagtaatgcaattaatatgagatgggagcatgaacttgttaaaaagcatggatttgatgatgtcgttggaatgttcaataaaacagacaacaacgaaattactaaaaattggtttgtacagtaaatgtattattataatttataataatttatattatatagaaattagagaatgtataattaattaatttgcaatatttgtcattggttcttcttcatattcgacttcgattctagctctctttgtctttatcttctttggtttaacttcaggttcttcatcatcatcttcatcatcactatcactttcatcatcactatctttacctaaccatttttctaaatcttccatatctaccatttcatcttcttcatcttcatcagcttcaacatattcaatttcaccagaaccttcatcatcactatctaattgaacatcttcatcagaatcaaattcttcttcatcttctaattcattttcttgatcttcatcttccattttacccaatacttttttccatattttatcatcaacatttaatggtttatcgccataagcaccactctttaatctatctaaaagttccttttcaattgatttttcgattctagcagctgctaatgcttttctttctcttttttcttctctctttttaactttatgtttaacaccaacataatttctttcactaacttcacctctttcctctcttaatgccatcctacgttcagtaatttgaacttgttttaatcttgtaaatctttgtttacatttattaatattaaaatcattccaatagagtaaattttcatcaatttgctttaaagcttttgtaaaatcttttgataattttatcctttgccataaattttttggtgtatgtgaacgttcaacagttttcatataaagatataatttaccatcaacttgtttaactgttgcatattgagcatttgctaatggacatgatctacgatcacataaacctgtaacattatattcatttctacagaaatcttgattattttgtgattgatgcgggcgaatttggaatgaacagaattgtttactaataactttccaaattaaatcgtcagacattgtatagtttatttaatgacggtggtgattgtataatgtaaagctggtataaattggtatataaactggtataaataaattaaaaataaaataaagtaaaaataattatatttttttttcatgaaaataatttttgtgaaatgaaaaattttttatcactgtagtattaaatactataagagaggattttacttttttttttagtattcgcgcttctcttattggcgtttcttttcctttcttttaaagaacgacaattttaaactctgatagtgttgattgagccttctctccaaggtatctctcaactttaataggtttaattgtatcccagtcaccgtatgcaccacttttatcaacaagtgcatccagtgtttccttcttactccatccttgctcttttgcaacttccggtaagaaagttgcagaacatcgacgatttccatatttgaaaataacatgtagtccatgttcaccaatattccaatttaatggattattagttatatcttcaaatgaatgtaatattgttacagcacattgtaaatctaaatttggagaattttcaatttttaaaatttcatcaagtgttattggtttaaacctttcatcttcaaatgctgatattaatgcatattctttaactgattttggtaatggtaatttactaaaatttccaatacatccacgtaatttttttgattttgtttccttattaattatattccaagtaacaaataatggtgcttcaaatggtgttataacataatcacaagcagtggcaatttcagattctggtaaacttacctttgaataacttggatcaattgagttaagtaatgaatgaattgctaaattggcataaaaataaactgcatccggtgttactgacattgttaatgtaatgtctaatgaattgtattgatacagtggtaaggtaatataaaaagaatgagatgcatagtcatctttaaatagggggcgtggtttactatgtaaaaatattattagagtttttaatatataaggatctgggtctccatcttcttaaaagtttgataattaagtttattaaccatacagaatgaacattgtttcaaatattacaaagaatgaaagttccaaacttgcagtatttgcagctggatgcttttggggggttgaacatatgtttcttaaacatttccaaattacctgaacaaataattgatgttcgtgttggttatgcaaatggtaaatcaaatattacaaatccaacttataaacaagtttgtacaggtgaaactgattttgcagaagcagttttaatttcatataatccatcaaagattacatatgaacaattaactgaatttttctttagaattcatgatccaacaactgttaatgcacaaggacctgatattggtactcaatatagaagtggtatttacactacaagtgaagatgatgttaaaactgcacaatccgttttcaataaattctccaaatggtatgcaccatccaatgtagtaactacaattgaaccattacaatcattctacgatgcagagacatatcatcaacgttacctcattaacaacaccaacggttacacttgtccaacccattacctaagagacgcaccaaaataattttactttttccactgttaacttaactgatctttgttcttgttttattttatactatactattgtataactaactgtacatatattacatctaatcaatggacgaatacgatagttacagtgataatgatgttcataatggaggatttcatgaagatgatctctccgatgatgaatatgatttactatacgatgtcttaccaacttttaaaaaacttgcattggataaacaatattctgtatctgatgaccttctcaaagaatatctttgggaagctcattatgatattgatgaagcattacttattctctcagagaatcataaacgtacgtataaataatgactaacttattaagactgaagcttgaactcttggagcttataacgcgagtgagagactttttcccatgtttcttctttcagtgccatcttggactctaaagaggaaactacagataaatgtctaaactacagttgttagcagagaagagacgacagcaaaaagaggcgaatgttgcaaataatggaagatctggtttagataaactacttcaaaagaggaaattagttgctcaacctttattgaatttagaaactaagaaaagacttaaagaaccagtaggtggtaaactaaataaagtagtacaaccatcactatcactacaacaaaagctagtagataaagatgacccattaatagaattatcactcccaacgccgtctttactatcaacaactactaaacgtttacaacaaccaactcatatactcccctcaattatttttgcaaataacaacgccctctctaaatctgtaattgacattaatacttaacatacccactaatatagccgttaaaattaaagaaaattttcaaaagaaaagtcctgatgataatagaaaaatagttaatacattatctgaaaaaattcaaaatgttgaattaaaacaagaaaaggaagaatcaagatcttcatcaacaataaagaaaccaacaaaggctaaaaataaaattgatctaatgaagaaattactctaaaatcttcaaaacctttattatcagctattgtaattggtcacgttgatagtggtaaatcaacaactattggtagattattatatgatttaggtatagttgattcaagatctttacataaacttacaaaagatgcggaacttgcaggtaaaggatcattttcacttgcttggattatggatcaaactcctgaggaaagatctcgtggtgttacaatcgatattgttcaaacacaatttgaaacttcaaatatgagattcgcaatcattgattctcctggtcatagagattatattcctcaaatgattaatggtataactcaagctgatgttgcaattgttataattgattcaacttctgatcttatctttgaagctagtagtgcagttggtaaaaatggtgatttctcagtacgggatattgctaaaggtcaaacttttgaacagttgaaaattgctaaaaatctaggtatagagaatgttcttttagtaattaataaaatggatgttaatgattgggatgaagatagatttatttcaattgaaaatgttttaaaggatcatttaactaatgaattaggatttcaattacaaaatttaaatttcttacctgcatcaggttttaatggtgataatattttcaatgattcaaaattatgtccatggtataatggtccaactctatttcaatatatggaaataatgaacactcaaacaaatgaaaattctcatataacattatcaaatcaatcaaaggatcaatttgtacttacagttactgatcttacattaggttcgggaattgaatctgggtcaattgtaagtactagtaaaaaatcagatacagtaacaattcatggtcgtgttaattcaggctatttacaacctggtgaatctgttaatttttggccgtcaaacgaatcaggtcaagttgatacaatttcaactgtaattactaaagtaaataattcaaaggacaataataataaagttgttgaaaaagttgctattcctggtgaatttgttgaaatgaaaatacgtaaagttgaattaattgatgcgttagctattggtgatttagttactaaaattacaaaagctgatgatgatttcgttaaatgttcaaatcaattagtttgtgaattatctatgttttcactaaacagaccaattttaataggtactccatttattctatttaaaggtaatgtttcatattcggctaaattatctgcaattgaatgggtagagaataaaattgaaaatgatgatggttcaattactctaaagaaaactaaaaaacgtaaacatttaagttcaaatcaacgtgctagagtcataattgaaactgaaaaattggtacctattacagaatcaattgttaaattaaatagaattgttatacgtaaagaaggtttgacagttgctgctggattaattaaaaaaacaatcatttcatagtatataatctattataagtaaaattattcctgccataaatatcatatatgcaaaagttttattacgtttactactattttcgttcgccttttttaagacaatattaccacttttaacattaccaacaatctcatccttcgtagaatccaatatagaaatattttcattttgtaatgctaattgaactccaatttctctaaccatactagcaacatccatcattgatgattcaatttgtgtaactgcattcaaactttcacgtttcatttcttcaattaatgaatgttgttcttcctgtaattgttgaagttcttgcggaataatatcttgttctaattctttaaaatcttcagaaactacctttttactatttcccaattcatatgaattatatgtagtacttaatgtagattttttcaattgtaataatctctctactcttttatcatgcatttcattccattcctcaagaacaacttgtaatttcaaccctaatgctttaacaacatttgaaaaaattgttcgtaatgtttcgttctttacactaatatattctgcataatcacccattgagataagattacgtgttaatgattgaagcgcattagaattattatcaatattggtaaaccctaccttatccaacatcgccgttagttcatctgaatcagcagacaatttctgtagttttgtttccacatcttgtaaattcttaatttgattagtgattctctgtaacttcaatctaatctctgtatcaaaaatcatcttttgatcttctgacatttctttagagttggtaagtaaatattgaggtcgaatatcttttattaattgatgcattgttgttaaagttaagtatagtgatcttgttttagtataaatttctgaatcagctaatttatatcctttctctttctttttatgtacaatttccatctttcccaaagactcggaatatatctgtacacattgctgaaagaatattgtcctgtccattatctccttgccaatttgcagaaagaaaaaagagatcatgcatattctgtgaaatgattttgaaaactgttaatttgaaatattatatttaaatgtgcgcctctgcctttaaaattaaacaattacaacttcaccttctttgtatcactttatcttaacccaatggattcagatatgatgagtagcagtgtttgggacgataatgcccctcaagaatcaagctatagctacaatcactttagtagaggtgatgatcaaccttggggagcagatagtttgtcaaaaaatgataatgatgatggcgataatgataatgatatcgatgaattcaagattcaaaatgaacttgcacatactatgaactcaatttttctggacaataaaaaagatgagaaagaagaagaagaggaagatgaagatgaaaacaaagaacatgagcatcgtactaatggagaatatcaagatgatagtggggttgatgatgttcatgggaacagtaatcattcagagcatgtgcattacaacgatactcataggaagtctgatgttggtaacccatttttagcaggctctgaatctgttaaagataatgatcatattgatattcaaatgttaaaggagaaaaagaatcaattattaaattcacttacaagtggtgataatgctgaaaaatcatttttgaaggattctaatgatgatctggataaatcagtgaacgaacttttcttgaaatctccacagaaaccaagtggaaactctcaattggataatctcttatctgaacctgaatctgcacctgcatctgaaactgagaccgaaactaagaaaaatgatgaacacggagaagttgcagacacagagaaggaaaaggaaaacgaagaagaaaaagaaaaggagaaaaaattgttgtcaccaattagaaaagttaatgtcataagaccaagaagagttatgaaacataatttacattcatcggaaccttcaagtgcagtagttgctagtgcttctcctcttgaagatccgttatctgcgcctgcacttccagatgatagaaatgatagttcactgaatagattatcatctccaactacaagaaaacaaaaattcatcaatgaagcagaagctcctcttttcgaaataaaaagagcaaatctgaatgtaaatgaaactaccgttgatcattctttgaatattgatgcaaattacaaacctaaagatgaaaaagttgaagattttgatataacggtaggagatccactgaaagtcggtgaattaacaaatgcgcatgttgtttatacaattaccacaaacacaaagtctactttaatgaatcatgaaactacagttgttactagaagatataacgactttttatggctttaccatcaattactgaataatcatcctggttatataattccgccacctccagagaaacaagtttatggacgttttgatgataaatttattgaaagtagaagactagcactggaaaatatgttaaagaagatatctaagagaagtgtttttcaaaatgatttagatttcatactttttctacagtctgaaaatttttctgaagaatcaaagcaaaaggaagcaattgtatatcatgatgatgaaaataaaattcaatcagaaaactctgatgatttaattaatggaccaatgaatacaatggcacagatattaaatgcaactgcaagtcttggaattaatgatggttcatccagtggtgggtttttcagttctttaataggtttaaatgttcctaaatatgttgaaactgataattatattctggaaaaacaatcatacatcgatagtcttgatgagcaattacgtcaattaactcaagttcttgatatgattctggaaaaacgtgaggaattatcactgtcattaaatgatgtatcaacggtattgttacaactgtcagatcttgaagtaaatagtgaaataactgaaattttaagtaactttgaagaattacaagtgaaaatcaaagaattattagagagaggaaatttatcacaaatatttacctttggtgcaacagttgatgaatatattttactaattggttcaattcgtaattgttttgaaaatcgactgaaagtttgtaatagtgttgcaacattacagaaacataaagaaaagaaagaacataatttagccaagtttaaagcaaagaatcaaaatcaaactgataaaatacatttttacgaagaagagttgaaaaagcttaatgatgtagtaggaaagcaaataaaacttaaggataattttgaaaagattttcaaggatgagttatcaagatttgagtttgataagataaaagattttaaaaatatgattgagatttattgggaaagtttgattgaaaatcaaaagattttgattgaattatgggaatcattttatgaaaagtgtaaatttgattaaattgttcaaaaaaaagaaaacattgtataattacataacttatgaaatattggaatattagaaaatacaaaacttttatataaaatgtaaatatagtaattatgaacaacgtacttgggaaaaattttacaatttataaaaagtagtattttatgcaagtaaaatttcccaaccccattctttcatcactgttgtccaatgagtccagctaccaaaaacattagattcatcatcaagaatttcatcatcttcaccatttaaaacaatactcattcttcgtttaacttttttataatcatttgacgggtgatgttcttgatttaaagtatcaatattaccatcaacatcacgatttttaccatgaaaagcatcctttcttgcccaaacttctttaacaacttcccaagctctttcaagtgtaccaatccacattttatcaattaattcagtccatctatcctttgcccaacctctttcctctcctggcaatgcttcacatgaggcaacaaataatgggaacatatgagtaacaacagttcttgaagtacttggaatactagctaacaacatcataacattctctgctaaactatgagatgttggacttggaatctcaggtacaatttgatgtaaatataataaagttgaatgtctataagcttcagcagttgcaactgctgcatttaaatcaaatgatggatcctctgtttgattttgatgttttaattttgataaacttggtaatttccaatgttcaattgctgattttaaatcaactgctttagaaattaatctaagtggtgttttaacttgtgttttacttgataatgaattaactgttttataatgacgaatttgtgcaattaatgttgcaacttcacccattattggaaataatgtttgagcaactcccaataatgggtcaataacatcaccatcttccagatcgaaacttctatatttggcaatgacagctgcactgtttgtttcattctttggtttctttggctttgccttacgtttatttgaattagttcctgaaaaactatgagcttttcttttcaatggaacactattaatttccctattaaaattgaaatccaaacttccaccaccatttattattgatgattgaactgaatagttttgatcctcatcaattacttcatcattttcaatatctgaatttctttcacatccagtatcatcattatcatcatttaattcaccttcttcacattcacttgtcattctagcaagaacatcaaaatacatccatgcattaactaaaaatgccaattcttttggtaatttctttttcttcaaatcttcggttttatcttcaacaattggattcaactgattatcagatggtatatcagacaagaaactattaatgctactcatactgttggtactatcagttctctttctttttcttttatgttttttctttccttctaatttatgaagaactctaacaatcatacttttagcaccttttaaatgtgcaattcctgtactgatatgtctatcccatgcttcacccatagctaatgcgatacatgtagctaatgcaacatcgggtggtatttttttagtcatctccttagatggtgaatttgatggtgataattctacaattttattattattggtatttgtagttaacaaattatcttgtcttctaattggattatttacattcccacttaaaccatgaactaatgaaacaattgcatctttcatatatttaacacctctatctcttaaacttgaatcacctctagctacatggaagcaagtcattgctaacaaggcacttctaactaccggatgatcttgtgacattggtaaaagaaaagttctccaaggattttcagttggaccatttttaattgacataattccacaagtatgttgatcaaatgcaatcagagtcgatagatgttcatcaggtaaatgtaatgaataaatgtttattggttgttgtggtaaaatggtttgtgaagaatttttatgttctatgatgtctaaagttgagcttatatcagaagtaattgatctaggagaacttacagctgaatcaaaatctgttcttttattatttgaatattgatcatcaatagctaattttttatcatctttatctaattcctgctcttcttcatttgcattattttcttgtccagcaccttcttctaattcatttttatttaatttttgtttattatttgcaaattcaactaatgatctaaaaggtgattgcggtatatttaatgatattcctcttggggtattaggatccattggtgatgcttgatttaaaaaatttgacattgataaatcattattaccaaaattattttgagagaatcccattgcaggtgaaaatggactaaatggtaatgaagatttataaaacattgtatttgaatcaaaattacttgataaattttcattaaccaatggagataattttgcataggggaaattagaatcaagttcctctattttaggtgtttgacctgtttgatgaatattgatattattattagtatcagggttcaaaatatcataattttgattcagcatgctataatttggagattttgcatgtaattgttgaatatatgagaaatttgatgattctttgaaaaggtttaaaggtgaatcatttggaagtgtattggatttagaagatacttcaatatttgatgactttctttctgattttgtaggtttatttgagaatccagataaaaacatttcagtaaatggtgaaggaggtattgaattattatttggacttgcaattgctatatctgccagagaatgcagtggggaattaattggttcatttttaatgttttgattaattttcaatttatttggttggatattgttggtttggttactgttagtttggttattattagtttggatatttgaggttatatttgaatcaatttgattattatgttgttttttatttgaagaatcgggctgtttattagtagtattagtagtattagtagtattatcattagtattctttggaacattttgtgatttactattcagtaattctaaaatttcttcatttgtatttaaatttgataaagttgaaacaattgcagaagctaaatcaggatttttaccttgagatataagtaaatttgcaattgcaacttcttcagttgatctaccagtaactgataaagttgcttcctctaatgctttcttaaggaaattttgttttgattttgtttcattttgtaatctcttaatttcatcaaaagtttgagcattttccttaaaagtatttgaatttttgatattatcagtagtattagaaggggtattatttaatttcgatgatgtgtctgaaatttgattaattttttgacctgtggaatttttattatttgaaaatgataatattgctcgtattattaatttgattttgaatatttacagttttattagaggatgtagatgtggctgtggttgttgtggcttattgaatttgattgatctgaaaaatctttccatttaaaattaattgcatatccaccacatacaatacctcttttaatacaattattgcaataaggtttactttcatcacattttaaccttcttttcttacaagtaacacaaccatttcttgattttgtatttcttgtctttggtttagttccattatttacttcaaccatggttatttgatattatataataagataaaacaagataagataagataagataagataagattagtatgtaatgtatggaaaacaaagttaagtgaagttaaactatattaagacaagataatagatagataaatactaaatgtataatatctctttcagagaatatagaaaggccaattcgggggccagaaaaagcaagcggaataagcttgcagagttaaagatataacaatgattcatcatcacattgtcatcactatcggcatatctacttactatctcgtatactatataattttaatgcccttatcgttatcggtgattgaaaagtgaaaactcttatcttatcagtggaaaaagtagacgcgtctgtgcaggtattgtcccttaaaatggaaatagtttcctattcgggtatggttttccgtagataagatagattatcattccttggtattttattcgtattcgtatttttatcctaagttagtttcattattactatgctataattataattatgaatactcagatactaatatttaagcttagtattctccctgtcatttgccaacaaaggctaggacgtctatagtcttttatataaatttaactgccttacgtaagtatacttatgtaaacactccctccacctgtgtattacctaatacaggtatttactataatatcaatattttcccccactaaaattaaccgttacttaccaatagtaaatgtcggataaactcaatccattagaggtttatcgtagatcaagattataagattttggattatcaactgaaaaactatttaagtataatgtattattacccatttcttttcggaattctctgcttcttattcttactttctgtaaataaagcaaaaatgtcattcccatattcattaactccattagctgataaggaaactttattaaaacaatttaagggtaaagtcaaaatctgaattaccaacacctggtttagttgttgatcgtaaaattttcattgaaaattgtgaaaaaatgttgaaaagtgcttcaaatcttgattttgaatttcgtgctcatgttaaaactcataaaactttagaaggtacaattttacaattaggttcaaataatttgaaaactgataaaattgttgtttcaactttaatggaagcttggaatttaacttcctttagttgaaaaaaatttaattaatgatgttttatttagtttaccagttgttaaaagtaaattacctgaattaagtgaattatcattaaaaattccaaatttaagattaatgcttgataattatcaacaaattaatacattaattgaatttagtaaattaaataatattactaaaaaatggtcaattttcgttaaagttaatatgggtacaaatagagcaggtttgaaaaatgatgatgaagaattggatttaatcattaattctttattaaaaaatgaagaaaatgctaaatatgtttcattatttggattttattgtcatgcagggtcatgcatattcttcatgtaattgttctgatgcagaaaattttttaattgatgaaattattaatggtaatattgcttgtaaaaaggcaattgcaattaatccaaatttaaatttgacaatttcagttggttcaactccaactgctcatgcagcagaatttttaaaattaaataaattatcaaatgatgaaaaaattgttggtaaaattgaattacatgcaggtaattatccattttgtgatttacaacaaattagtacaaattgtgttaaaattgaaaatgtttcatgtagagttttaggcagatgttttatcaatttatccaaatagaggtgataaaaaacctggtgaagaattaattaatgcaggtgtaattgcattagctagagaatttggtccattacctggtcatggtagaatttattcaccaaaaggttatgaaaattggattgttggtagattaagtcaagaacatggtattttaactccattaaatgaaaatgaagatacaaaattaattccaattgatacaagagttgaaattgtacctcaacatagttgtataactgctgcttcttatccttggtattatattgttgatggtgatgatatcgttgttgatatttgggttccatttagaggttggtaatattatatactttatataataatatactgtataccttacattaattaattgacattaaatattttagaacatttactttagatctgtacttttcaaactgataaggaaaatcatattgaaaatttattaaaactttttgtaaatttatttattatatttattatatagagatacatgcatataaaatctaatctaaagttgcaacagcttcaagttcatatttaattgcagcatccataaatgcaacaacaacacaatgaacgagctggcttttgtggaaaatattgtccataaactttattaacaacttgaagaataatttgcatgagatataaacattgtaactttgaaaactttatcaagtgatgaaccacctgcaactaaaactttttctaaatttttaattgctaaatgaacttgttcttcaacatcatcaggagtttcaccagttgcataatttgatccaattatacctgatgtgaaaacatgtccattactaacaaaagctggtgataaagttggatgttcaacaccttgaattgagtcccatgttactttagttgctggcatttttatttgatattatattaagagaaatcctgtttcttgtggtgctaaccaggttcaatagaatatagtcaattgttggaaataatgttccttttataacccattctaactgcttgatctattattagtggggggctgaatttcttatcagtagattagtggggggagtaaatctgagatataaccaatagtatctaagggggggtatttcctattcatgcagtatcttcagtatctcttaaagctatatgtattccattgcaagaaacttagtagaaggtattggtgtattaataagagtagagtatccattcatgtaaccagtaaatcccttacgtcacaattagtcttaatctcagaaaagcaaagcgaagcgtgtttactttttgtgttattgtattatgattatgtgcatgttttcttttaccactgtggggagtgactgtcttgttatagatttacagttgtgaattatataatataagtatacatggctaatagagagacttcacgacttgcacctgatcctaattcttcaggtatgacattctctaattatcattcagatccaaatgtactctctatacctaattccaattctagggatagaagggatagtaatatcacttcaacttcagtatcaacttcaagtaaatcatgaaggttatgaattttcatatttgaaaattatctttgttatagttttatttattatttcaatgattacttttgtatctcaaactgaacttacaagtttacttttcactaattatggttttgatgaaccaatcttattactttatctaaatcatggttcttggtgggcactttgggttgtacaatttgtttcaattgctctattaaaatcttttaaaagatatttgaatcatattaaaggttatgatgaacttaatggtaagcgttggaaaggttttagaaaagcttttgcaagttctgttaaagcacaacatcaaaatatttttcatactgctgaattaacaactaaggcaaataatccaaattatcaaattatatacaatgattcaactaaaagtttcaaaaattattcaactttcttcaaaagtgaagccttactttatatgattaaaatgtcagttttattatcaataattttaaatgttgcaggtgttacttggttcattgcaatgggattatcaactggtagtgatgttactgcaatttataattgtagtgctttcactgcttatgtttttgcaattccaatcttaaaggaaaaatttcttggattaaggctaattcagttataactgcagttgcaggtgtctttgttgttgcttatatgggtagttcaaatcaaagtaatgatgcaaataattatccttatagattaatgggtaatctgattattttagttggtgcaatattatatggtttatatgaagttttctataaaaaatggtgttgtccaccatctgaaattgttagtgcaagaagacaagcaactttttcaaattttgttatgtgtttaatgggtattagtacatttttcttacttggtataggtatgttaactgttcatttctcaggtttacatcattttaaaatcccaacaaattcaaaggcaattctgtgtattgttttaagtttgatttcaaatcatttatttagtgtttcattccttggtttaatgtcattaacttcacccgttttatcatcagttgcttcattattaactattttagttgttggtgtttttgaatggacatttagaggtataattataacatttgctcaattgtttggatatcttttaattattattggattttcattattatcttatgcttcttggaatgaaatttcaaaggaagatgttgatgatggttatataactgatgcagaatcaacttatagtgcatcattagcataatcacaaaaaaatttattgaactttacttatttttacttgacttaaaatttacattctttttttcaaatatatccttttttatacatagtcttatttttgttattatttcctgtaatataaataaatatgataccttattattcaaattcatcttaataaatatcactgttacttactaaggaaggtgtatctaagaaccgctttaccttcccaaaacggcaattcaaaataatttctaaatttttagaaaattgcataaaaaaatgaacgatttctctctgtgactaactgaatcttatcaagttaaatctttcaactaatcacttcaacgctataggcaatgactgaagaaattacagctaaaacagcagaagtaaatattactgaatcagaacaaaaaattactccttgggaagttgaaggtgccgtcgttgatggtaaagctgttggtattgattatgatagacttattacacaatttggtactaaaaaaattactgaagaaacattaaatcgtttccgtgatgttacaggtcatgaaccacatcatttcatgagaaaaggtatgttcttttctgaaagagattttaataaaattttagatttatatgaacacggtgaaccattctttttatatactggtcgtggaccttcatcagattcaatgcatttaggtcatatgattccattcttatttactaaatggttacaagaagttttcgatgttcctttagttattgaattaactgatgatgaaaaattcttatttaaaccaaaacttacaattgatgatgttaaatcatttgcaaagcaaaatgcaaaagatattattgcagttggttttaaccctgaaaatacttttattttctctgatttagaatatatgaattcatcattttatgaaactgttgttcgtgtttcaagacaaattacaacttcaactgcaaaggcagttttcggtttccaagattcagattgtattggtaaattacattttgcttcaattcaaattgcaactgctttcccatcttcattccctgatgttttaggtttaccatctaaaactccttgtcttatcccatgtgcaattgatcaagatccttatttccgtgtttgtcgtgatgttgcagataaattaaaatttagtaaaccttcacttatacattcacgtttcttccctgctttacaaggttcaacaactaaaatgtcagcttcaaatgaaaatactgctatctttatgactgatactgcaaaacaaattcaaaagaaaattaataaatatgcattctctggtggtcaagttacagttgaagaacatcgtgcccttggtggtaacccagatgttgatgttgcattccaatatttaactttcttcaaagatgatgataaattactggaagaaacttatcaatcttataaaaagggtgaattattaagtggtgaattaaagaaattatgtattgaagttttacaagatttcgttaaaacattccaagaaaatcgtgctaaagttgatcaacaagttcttgatagttttatgaaacctcataaattagtctggggaaataaggaaagacttgttcctgcaaagcaaagagaaaagaaacaaccagctaaaaaatgattaagctagtataaatcgtattgtattgtattgttagtctatgatattctacatattcattatataaacagttttctatatttctatttacaatttctataaatttttgttcagatttctcttaaaacttttaaaagatcttgttccatagttttcaattgtttattaacaatgtcttcaggaactttgaattgtttaccaaattcatcatttttaaaccaattttgaatatcggttttctgtgattggaatgattttttaccatttaaaattatttcatctctgtttatttcacgacataatgatttaactaatttttgaactttagtaagtttactcatttgacttttaccgccaaaatatgtattggcgtttgattgtttcttgatactactaataactctatcaaaatcttgaatagttaaataataattgttaaaatctgctgaaatagcattggatggtttagctgaaaatgatggaatgttttcagaattggaatttggatttaataaccattcaaaaatattcaagattgatttttcaatatcagaaaaaaataattgatccctcttgtttcttagaatatctaagaacaattttctatagtcatcccaaattctactattttgatcatatactataagttccttcaataaagaaacttcaactgtttcaatattgtagacttcactgaatgacaaagaaaatattttcttaacagtttcattgattttgtgattaccacattcccacattatctttctatctatattatcgtgtaattttaaatcaacatcttttcctgaatctaaaattctttgatacgcatttctcaatgtaggaatataatttgaattaatagatgtgagtgataaatcttctttctttaatctagcattctggattgcgtaacaaacagtttgaaaataagtaattgagttttcaactcttaacttgaattcaatgaaaccttgtaatttactgaaagtacaattttcaaaacatgacattaacatagctgaaagttccattggaacattatgagtataaaatttattgatgtgttgattaactcaacatcacgggttttagaactcaaatgattcataaaatatggagaaagggtgtctatttgtacgtttttaattttcaatgattcatatattttctttaatggtggtgatatattagtatttgaataaaatgttgcaagccatagcttcagatggaattcgtatttatttttaaccaaagagttttcaagaacgataatcaagttcaagaaagtttgctcggttattgaatctttgttaattgttaagtatgtttggatcgcaagaatgataaattcaaatcctgcaaaatagtcaaaatctggaagtttgttttgtaagtgtttagttgcatcaaaatattgacaacaagtagtgaaatactctttgctttcaaaaagttcaggtgaaacatttgttttaaatttcatataattaactagtataatcaaatccttctcagtagctttcctttcaccagttatcacagagttcatctcattcttttcaaattgttcttcaatcagtttcaatattgaagattttgataaaacgtcggaatccaaaagattcttcagatccaaataacaacataatttatgcatgtataatgaaaaataattagaaacagctttttctttctcttcgacattatcatcatcaataacgtgaattttggcaagttgactatttcttccaactttataattatcaataatacttttgatattatcaactttgttgatctttttacttgctaaaattgcaagtttccatgtatcgtaatcatcaacacatgtttcaactaaatacttaacagatgcatcataaagtttatcccacatttcattctttttcagttcatcaaaataaattaacaataattctaaatcactttctttatttaagaatttttctaattcttcaatacatgattcaacatcaccttttttcaatgataattcacacttaacatacatttcctgtgcattaataccatttttagatacttcttcaacagattcaataagtttcaaaccaagcattgctaataatttatccttaccacctgataatctatcactttctttacaacatttaattacaattaccatcgttgcagctgcccataatttaatcattctaccattttctgtatcaactttaaatcctttagataatgacattgcagatttttgcatacctattaaatcattattatcaactgtgtatttaaaccattcataagctaaatttggagtttgatattttcttatagctgcttcgtataaatcattctcaggtttgtaacttaaatatgaaaatgctttgtttaataaatttatactatttggatcagatggtgtctttttagataattctaaacaattcttgagtgcttcttcactggtaatcttataatcattacttaatgacgcttttgcttgaataaaacatttaatagcatgagattgtgaggagtttggttgttctttaatttttttatcagctagtcttaatgccaatgtgtaattatcagcttcaagagctgcatcgatcattttattgccagtcgacattgctgttctttgtcattaaaagaatgtgaaagttactacgaattaatgttgagcgtcaaaaaaattcttgaaatcgatatatattacgatctctagctttcattgctacaaaatgctacacgtaaattttttaccatttaacatgaaatatatttattttgtaaaaccaactctatgagattacacaacccaagaaaaagcaatctaacaataattttaattataaaaagaaaaattgaaaatacttaattagcaaaagtaaaatccccacttatccatctattaaccatatctaaactattagatggttgatcaaatggaaccatatgacctgcatcaaatacacgtaaaaatgttaataaaccatttgactgaactgtaccagcatgtgaattatcgattttggaataccaattttcaattgtagcattagtaaatgtatccttgcctgaccattcaagttcatttgaccatcctctattacctaaccaattacagatataatctttatcacctgcataaagtaaaacagggatacttaattctaatatctctgaaataaattgttggaaaggttttggttcatcgcctgataaaatgaaatttctgaagacttgattatcacaaccaacataagatttgacttctgaacctaaagctttcataacttcaggttgatttaaatatttatcaattggtgccatttcagggtaacaaccatcaccaatacaaggtttacgaatatcataataatttaaacctgtcttttcaaatggacccatcattctttcacaatataaatttgcaggaacacaagttaaagcacttttaagataataacatgatttaattaatgctgcacatcttggatacattgattccattttttgacaatcactatcaggaattaattgtttataacctgattctgtaccattacaagccattggaatataatgataatattgaattaaagcatcagttataccattaccaatcataactgatgataaattaaagattttttccttcttatttgcaataacgctagcaatatttggaatataatgacctgcataagattcacctgcaatatggaaatcattaccagctaaattgataaattttgtaaaaaataattgtaagaaagcataaacatcctcagctgcttgttgagtagtggaaactttacttttctctgcatatgaataacctacaccaacaggttgttctaagaagataattgaagcatttgaattccaagaatatggattattaacaggttttaaagttgtgccattgattgaggaaggtcctaattcaaagaataaacctgtcattgaggaacaacctggacctccatttaaccataaaataacgggatcatttattggatcatttctactttcgaaaaaccagaaaaataaatgtttatccttttcattaatatcaaaataaccagtaaattgtttaacagtatcaacacctaagatagatggatctgaatctaaatgtttattaactctcaaagaatatgatgaaagttcatctgaagatacataatcatattttaagacattctctaaaattgagttaatatctttaatagcacttttagctaatttagaagtagaataagattcatcttctaaaatagaattgacataagattcaatttcatctttattaactgtactttctaataattcccacgcatttgagacttcatcattaattaaagatttatcgaaaacaccttcctggatatacttatcgagtaatccatgagcatttagcttatttgaaagaactttttgaccaataggattagcagatactcccaatagagcatatgatgctgatattatagtaaatagtgtattaaaccccaccattgcaatgttaaattatctcttcaaaatgaactgtagatatatacaaccagtaatttataagaatgagccctcaccaataataaaaattaaaattatttaatcggaaaaagcaaaacttaaagattgttctcaaataggaaagtgagcaaattaatatcaatattttccactttgattgtgtcgattgtctctgtttaatggtcaagaactattgatgagtaatgttcagtaatatgtttgagcaatatatctctctttttaactgtttaagagttcaactttatatctgtccaggtgtctcataaaaggacccttgaatatccacaaaaaaaaagttttccatcgattttcacttgtacatatttagaataatattaaatcggtgaactatctattaaatacatacggtcactagataaaacataatgaaggttttacttcccttttctacaataatactattatttacaactttcactaatgcaatcgtcatctcagattcacatttagcttcttcttgtatttatttcttacgtgaactgtcttggaattgtaccagtttaggtggtcatatgtcctcttcaacttggacctgtcaatgtttcaatgatgattggttaggctcaataactaattgtatttatgattataaaaattcaacaaaggaaatgaatcatgcttatcatcatattgttgaaagatgtaatgttagagctaaaactaattataatgttactttcttaagtgattatcaaaaaaatacccaagataaattaataccagtcacacctttcttaaatggatcatcaatcacaggtcctgttagtattgatgatgcaacttttgattatttttataaaagttttaaagattataatattttcattgctatgtgtcaaagattaggttggggtgcagctggttattggattgcagtcttcaggtctaattggtatctataaatttattgcttatagattcactccaaaatcattgaaaaattatgctaataaatatctagtttggaaatctgattggtttttatttggattaaatagatttgaagcaattgtcttctttttcttttttgcctatgttttattagcctgttgtattaattattcattggaattaaatgcatatttaacaactcattatttcttacttattgatttaattagttttagaactgatatcattggtttttcattaattccagttgtttatttaatgggtattagaaataatccattccaattattaactggtgtctctcatcatgttatgcttcaatatcataaagttgttgcttttgttttctttattttatgtgttgttcattcagctatttggactcattatgcaattcatattggtggtggttatgcatcttgggctgctgatgcttatttctattggggtattgttggtacaattgtcgttggtttaatgattttacaatcttttgctatctttagaaatagattatatgaaattttcttattttttcataatgcatttgccgtcttatttgttgttgcaatgtggttacattgtaatattttaggttggatgggatgggtttattccattgcttcaattttggttttcgatagagtttgcagaatttatagattcttcaaaaatggtttatttaatgatgttcaagttgatattgttgctaaagatgttgttaaacttcaattcaataaaccttcaatattttatttcttcccgggttgttacgtttatttaaccttcattttcccaaataatgttccatggtattatagtttccaatctcatccattctcattattaagatctcatgaagaaagtaataaaatggttctttacttaaaggccaaaagaggtgcaactggtcaattattgaaaattaattcttcaaatattaaagtactaattgatggtccttatggtgttttaccattcggtgaaaataaaaatgatgattcaaatgataaagttttaggaattgctggtggattaggtatatcttcaattttaacttatttcaacgaaagagcaaaaagtttagatgatatgtccaaatataaaataatatggtatattaacaatatccaatatgttgatatcttaaaagataatttggagtatttaatctttgagaaaaatgtatctgttgatatttattacactggagattcgggatctaatgaatcagaaattcaaaattgtcattcatgtgaaaaagatactgattctgaaacggattctttcactcctaaatcatcattcaatattattcacagcaaaacaaaaattgaagaggttttatcacaaaattcagcagagcaaagaaaaatttactgttgtggtcccggaagtttcgttaaagaacttaaaaactctcttacttttggtgatgatttaatatgtgaaaaccatacatggtaaatgtataactattttcttctttataaaatgctactttccttttaaataatatattcctcagttaaaagtctttaattattacttgcttataatataaagtttatccacttatttatctaaagaacctctgaaaatatggtatgcagaagcttggtttgatgcgaaaactaaagtttctgcaatgacagtattttctggtcttgaaacagcaaataaaattaattctgcaatatcagtaccatataatggttcagtaccttcataaactttttcagctttacttttatcacccttaaatctaacaagggagaattcttcagttgcaacattacctggttcaatttcaataattctgatcttagtattaattaattcttctcttaaaacatgagtaaatgatcttaatgcagccttagttgcacaatagatacctccaccagggtatgggtttctacctgcaactgaacctaattgaacaatatcaccaacatttctttccttcattttattaacaactaattgagttaattgaatcatacctaaaacattagtttgaaacatttcttcaacatcagtttgtggaactgagccaattgggtctaaacctaaagctttacctgcattattgactaaaacatcaacagtttgaaattcttctggtaaattctttaagaatggttcaatagtatcaagttttgaaacatctaaagtttcaatatgaactttaattgatggatattcctttattaaatcagcttgtaaagcttctaatttttcctttcttcttgcagctaagacaagttttaattcaccctttgcagcttctgcaaaatatttagcggtatggtatccaatacctgtggatgcaccagtaataagaatgtttttacctgaaagtctctttgcaatattaccaaacatatcaattgtcaattatgaagaatattactttgtctaaatgagaaaaagaagaagaattgaaatggaaaagaattagaatctttcaattgatcttaaataaaagacaaccacagttcatgcctattgaaattaacgtatcttacccgggaagcgagccccgacattcaacgatcggagaaaacgataagggtcgccgcaattaattttaccttgatccgaaatttaaacgttttttacttggctaatactattatatcggatcttctagaggttttatcatggcaatttccttgattggtgtgtattaagaagaattgtaagtatttttagcaaaaacacatctaaaatttcgaaataatttaaaaacaatcagggtaactataaataatataaaaatatgtaatttgtaaacaaaactataaaactctaccgacaacagcaccatcagcaatgtgcatttcactttcatcaactttacgtaaagatttaccacctgtaatttgttcaagtaatgcaccgatatttggtggaccgccagttggattagattgtaatggtgcaggtgccatcgctggaggtggtggaggtggtgaaattgttggaggtgccatttcaggaactggaggtggtggaggtggtaacgttgatggaggtgccatatctggaattggtggtggtggcaatgatgttggaattggcggaatttcacttgattgaattgatggagcatctgtagttgcaacttctggtgatgatggtggagttggatcaataaatgatgattcttcagatttagcatcgtaaaactcagatgcatctctacttgatgtcatttcacttgattctggtgcattaatttttgtttgttcatctaaaacatttgaagcactttcttgaatatttggtggaaatgattgtggaattggaggtggcattgatgaagggattgattctggttctgaaggtggaactggaggtggaaataattctttttcgacaactttttcaacttcattatatgaactatcaacacttggaatagattcaggtgtttgagttgttggaataggtggaatataggtactacttcttgatggttgtgcgtttccaccaaatagcattgatgcgagttcagcttgtttatttgcagtaggcatatcatcatctgaatcttctttttctgaatctgaccaaccgtcatctttactgatacccatttgagattctctttgagccttcaatttttcatggtcaatcttattcaaatctgtagatgaagttttttcagttgaaggtttagaaaatgggttattgttaacaacttttggttcttcagatgcttttgcaacaggaactggttgtaccgtagtattggaagcactatttgccattgatgcaaatggattgttactatgagctgataaatctttctctgtagttgcaacttttgatatactttctttatcatcccattcatcatcagattcttcagcttgtttttttaatgctgccatttcagccttcagtttagccagtttttcttccttttcacgttgcttacgattctttctttcttgttcacgtttctctaattcttgcttttgctttaacaatgccttatattcttcgtcatcttcttcatcatcagcatctgtgtcactttcagtatcaaagtttgttggtttatttgatgatgcgggtggtggtggaggtgaaacattattggaacgtgatcttggtgtagtcggaggtggagcttgtttaacaggttcagcaactggagcaacaggttttgcaactggaacttcttcaactttaggttcggcaatttttggcgattcaacctttggagatgtatttgaagatgtatttgaagatgtttttctactgattcctaatttagccaatctttcgttcattctcttttcagccttttctttaattcttttagctctttcttctgctgcagataaaccaggacttggggttgttgaaacgttagttggtactacttcttctttttgaggggcttgagcatttggagaaaccttttgaacttccttttgaacttccttttgaacttccttttgaccttgtaaatatggattggataacgaagttggttgtgaaattgttgttttgtgtgcaggtttggtagaattcaaataatcaataaaatcagaaacttctttactttgaacgccttgttttttctcccatttggaataaccaacagacattgaattagttaagttcaatgaatctgtaacctcagaaatcaatgatttgattgattctgcaatatcttgaacaatacttttttgcgcttcagtttcttgagttacggaaataatttctttacttaatttagcttcattatcttcaaatgcatcaaagtttggagctggtttaccagttaatttagccatctttgcttgtaacagagctttttgtttagcaattcttctatctgcttccgtaatttcaccgtttggaccagcacctttaatttcaattcctgatggattttccttttgtaacttcaatctgtaaatttcaatctttgcagcttttatcttatcatccatttgagagattgcctcgactaattgtggaactttatcagaaaatttgttcaattgagagctcaatttggttttttgttcaacagaatcaatatcagaataatcagatgagtttaatgtagattgtaagcttttaattttagtttttaacatttcaatttcatttaaagacttttgttgaattgcatttgatgatgtatcatcatcttcagcatcgattgcagcaagtaaaatcttcttctcgtgaattttttttttcaaatcatcaactgaaagtttggtggaaaatgcatttgattgagatggactttcattctttcttctatgtctggaatttgaaacataactaattgaattatcattattcttataaacggtacctgatttagtaacaccttgtttaacattagccggactaccaactccaccatttgatgcttgttttctcaactgatctttcatactgtcaacagtattttctaaaacttttgaagatggaggaactaattcaggtggtaaataagttggaatatcgtaaccattcaatcttctataaattaaatgcattgcaacagcaaattcatctttgtttaatttacctttgtttccttgatcacaaagggtccaaatactttccaaatcactgaaacttaaaccagatttagtaaagacaccaatagcaatatcacctgaaacaaatccgtgtctttctttatcccattgtttaaaaatattatcataaataactttttcttgttttgtgatagcccatgtaacattagaagctgatgagccacccatttgattttgtaatgatgatgattgagattgagcatttggcatgaagtgtgattgcatcatatccatacctggtaagccacctgttggtgttgagacaaatccccattgacctggtctaccagttggcattggttgtaaacccgtttgttgaggcatcaatccacctgtttgttgatcaataaatccacctgtttgttgaggcatgaatccacctgtttgctgattattaaaaccgcctgtttgctggttagtaaaaccacctgtttgttgaggcataaatccaccagtttgttgtgcagtaaaactagtcattgggggtgcagtacctgtggcttgagcaattaaaccaccaccagttctttgtgagaaaataccagttggttgtgcattaatcataccagtttgttgaacaggaataaaagaagatgtttgttgagcagttaatgggactaaacctgttctctgagcatttaaaggtgcttgagagttgttataaccagtcgcttgtgatctaattgggttatttgcagaataatcattatgagctccaatattaaaattgattgtatcaacaaaaccagtaacttcatttttaatcttagtaggtaattcataaggaacggattgacctctcttagccatatttgctaaatgtagtgcaacacaaaattcaggaaacattaaagaacctgatttattagtatcagctaattcccaaatattggataattgaacagcagaaaggttagatttcattaaaattgttcttgctgtattaccatccattgcattttcaccctttggaacatgatgtctaaaaatattttcaaatctttcttgatctcttgctgaaataaatgataatctaatatttggtaattccaagtcatttttttgagtacccatatcagctaatgttgaaataaaaccagtaggttgagcggttaatggttgttgttggttaaatccggttgcttgagattgtaatggcattgaaccaaaagtagttggtggttgattccatccagtggcttgtggaacttgttgttggaaaccagtagcttgtgcttggaaacttgtgattggtggaccttggttccaacctgtagtttgtgaagctaatggttgttgttgttgttgtgatgcttgttgataaccggttgcttgtgcttgaaagctggtcgctggtggaccttgattccagccagtagtttgggatgttaaaggttgttgttgttgataaccttgttgttgataaccagttctttgtggatttaagccttgaccaccagtagcttgagcttgaaaactagtcattggaggaccttgattccatcctgtagtttgagaagccaaaggttgggtttgttgttgataactttgttgttgaccaaagcttggagcacctgttggttgattttgaacctgagtaccaaatccaaatccagttggttgagattgaagttgattgaattgagattgttgttgaggttgctgttgttgaggttgggttgaccaattgttaacataaccaccttgttgttgaccttggttattgttataaccgtaggtttgttgtggttgttgttggttgtattgatacattatggaagtatacttatctaccaataattaagaaaagtgagatttattaagtttttttaatgcaaatgtgattttttgaattttttataatgaattaaaataaataaagagtcaattaagattggatccaagtacacctcgagtgttgatgtttggtcttatctgtaaaaggaagtaaggataatataagtgaatgaaacaactcactaactaattatgaacatcattcatggtgcgagttttaaattttcgttggtttattatgaaaatgcagtaacaattaaaattaagtatattataaagtataaaaaagaaagggaaaatgtacaagcagaagatatgaactatatgaatcaagcatcataaagttgttgaattgaattaactagaccatcaactaaataatctttcaactcgttaggtaattcagcggtagaatcagaggtgttttcaccaagatagactctcatgtgacctaatatgttaactaacagcttatttaacttgaaacactggtttggatcatatctggaagacaatttatgattgcttgcatattcgtttaaagagttaattaaatcaatggataataaatcataaacattgagtaatgataaaaattggaaacatgataatttattgtgtttaacatcaggaaacctaaacttaattaatattttaaaagagctttcgtaatcatttgtaaacatcaattgatatttcaaagcggctgaaagaattccaatattaatttcattgttgtcttggtcgaatctggatttactgaattcaatacattcagataatagttttgagtttggttcagtgaaaaattcaagtaatttgcattttaacttcatctcatcatcagtggaatgatcaaatagttctattcttcttaaaagtttcattatctctgatttaagttcagtgcatccatttgatatattagtttgttcaagttttgacaaatcatcaagtttaaggaactcaaaacgtaagatttccaactcgatatttttcttgacacataattgatataatttgttaatcaaaaacttagaaaaaatatcagttaagtcagcattatgagatttatgaaatataactttctcatataatgttatatctttgaatttttgcattgttaattcatttaaattttcagatttcaagtattcaaccgattttagccaatgtttttctccagctttttcaacaattattctattgaacaggctatttaaaggcttataatcattcattgctaaccattcgcttatccatctccaatataatgccttaataaaactattttgtgcagaatcttccaaatttaatgttttaatcatgctcataaagaaattataatttaattttttggatctaatacagtttgtaagaatttcttcggattcggcatatgttatttgaaaaccatctttaactaattgtttaggattgcgtagtacagctaatgatgatgtgactataccaataaatgaataagaaaatttgctgcttttttgaaattgggaataagattgataaattgatggaataacataacagtaaaataaataggcagataagagtaattttatcataccacgcatccctaaactaaaatcaaattcaatattagttgattgattcatttgaagtgaggaaacgctattgaatgaaaaaataggaagtgcaaataaacctctttgattaattgatgaactatttgcaaagtcatccagtgatgaagctccgagcatacatcctatactacccatcattattttatttgttaatgattgatggtctgggatttgttgattttgaaagttaggatctggtgacactaaattgctcccattacttgtaccattactattgttattaccaaaaggagaagaatgtaaacttaccgattgtgttccttgattctgttgttgaaaatattgttgttgttgaagatttacattctgacgtacattttgttgttgttgttgttgttgttgttgttgatttattatttgattaatattaattccagatgaatcaataatgtatcttaaacgattgttttcttctgagagatttgcacattttttctctaaatgtttaatatattcagaagctttcaaaagaatggtagctttatttaatttttttgctggttttaaaccatcaagtttaatttcatcatctgaataaccattaccttcataataatcatcagtttcttcaacttcattacctgtatttctagttctatgattaccatttttagcaactaaaatacgtaaagctggaacacaatttcttaattcaataattttggaattgatatttgttctatattttttttcaattaaattatgagatgatttaatcttacgaccatgttttatatttgaagatccaaattctgtattggaatctgagttattatcagttgtatcgaattgagtactttcattatttggtaatccactaagattgaaacttaaagaggaatcgactgattgattttgtaaattatttaaacttgttggaaaacttatattatttaattcttcattagaaaggacttttcctggtcttaaaattggattatcattatttgacatattggaagcacttctactttcatttttaacgttcatattagtagtatcaagattagtattattactattattactattattattgctattattattgctattattcttctttctgaatggtgagtttggtgattctgatttccattttcactttaacagaatcttcatctgcttcttcaacagtatttaatgtttgaaaatgagtattatgataattatcctgagtattgaaagtaactgtactatttgaagcagattctgccattggtacaggaatcaattgttgaggataaagaatatcattattcaaattactttgattagctaaatcgacattaaaatcatttggatcttgactatattgagaatccacgtgtgaacttgttgaacttaaaaagaaatcatcaggggatgaaccagttgaataaggagataaaattccagaatttaaggaactaacagcatcattaaaatcattaaaattgacttcagaaccaaattgagatgagtgattactaacaaaactaccgaatcttggattatgttcagtatgatgactttgttgtgatggtgaaaatagtgaatcagcaaacatggaagattggttattaatttctaatggtgcagaagtttcattattgtaaccttgtgattgttgttgctgttgttgttgctgctgttgttgctgttgatatattgttgctgttgttgaagaaacatttgagtacgatcaatgttttgttgattttgttgttgttgttgttgctgttggttattcatttctaatactctgtaataattgttaacaaggggtgctcgattttataagagctgatgacgttaattataattaattaaatttttgaggcaataaatataatattttttatttttgcaggagaaagaaatttcaagaaaaaaatagctattgtgaatttttaagacacaatgtatttgatactttccaaatgcaaatgatgtaaataaacagggaactgagtgttgcacagtgaatggaaacaaaacagagagtattcaattttagagagacaacaattaataacaaaaatttgaatactataagaatctcgaaaatgagaaaacgaatcaaattacgtcggcgtatattttttattcactaaaaattatttttcttcacggtatatgttatctctatttcttgatttgtattgttagcaaaagtgtatttatccagtgggattaatatgctctttgttatacctaagttgcgtaaatctctgtaaactgatttgaagaaacttaatttggtaatactttattgagtagtaattttattttgttttgttaatgattaacaatgtgaaggtgttgcgatgacctaaaagcattcctaccaatcaaaatcattttatttgcagttgttttttttttattaattattgccaataatagatgttttctgtttataataattgtaaattatcgtgacccaatagattattaaaaggggattggggaaaaaaataactccttaaagttaaacaatttttacagtatatgataggattttatgatttagttgtaatgcataaatatatgaaactatttacagggaaagggtagtgaagattatatattatatatatatatatatataaatgattaaaatgtagtttagtttaataatttacttgattaaagtagcatgagatttatatagataaactggtctgattaatgttaaaacggttaaagagtatcttgaaaacaggaatagaatgattacaaatgcataatatgattatgtaaatttagtgaaaaatcagatgtatattgatgacagtagttaaccttagccaagatttactttagagttagaaaatgttacgattaacgttaataattaatcttggtttaaaaaaagtttatcgtacgtttttccttattctagcaatgtctctttaagacgagaaaaaagtaatgcgagctatgtggatcgaacacatggcctccagatcttcagtctggcgctctcccactgagctaagcccgctttaattgtgttgtaaactaaaatatgtaagatagtggataatacttaattacgtaatggaagtaataagtataaaataagtttactcgttggaccttttatttgtgtaatagacagcgagtagcaatgagacggttggtattaattagtagattgttctctaactaatactctgattaatgtcccctctcagaagagagttatacaaagttatacaggatatcatacttatttatattacaatattaaccattccttaatatagttaattaaactattccttatcaatcataccactccttatcataattaattcaatttcaatctaagtcattcctttcttactccgacatctccgaacctccgtatctcggaattcctatttccatcttatcatctttacgtaatcagcttacctaatcttcacgtggatattattgaacaacttgtatttattcccttacattaccccggctgttgggaaacatcgtccctgatgttaaaattaaattaaatcaaatacttaaacaatttgctcatgagcacaaatcatcttggcattatgaaataaactatgacgaagtgattccgaagccgtattaaattgatcagcagtaatagttgtagcaagtaaaggatcacaatctctccaataaacatcaaaagtattcttttcttcatcaaaaccagcaataccacacatttgattaattcttgataaaatttcagcattagttctaggtggacgacataataaatcgactggaggaacatatggacgaaaatttttaatatttaatactctatcctttttattaatcttaggtaaatcaacttcaaaagcattatcattaatttttttcaccaatctaaatggaccataataagcaggttgaattttataatatttagcaaaagcaccaaaagcatcacgatgcaataaaatataatcaccaactttataattatgaaatctatgtgatctattatgatatttttcattcaatctttgagcttgtacaatattatcttgagcttgagttaaagttaatctcatacgtctagcatattcttgagcatttggactatatctattatcatctaaattccaactattaacacttttcatagaatctggtttatatcctatagctaattcaaaaggagaacatttaattgaatcatggtaagtactattataagcaaattcacacattggtaaaaattcatcccagtgtaaatgatcatttgaacaatgttttcttaataattgatttaaaactttattaactctttcagtttgaccatcagtttgtggatgattagtagttgaaaacaataaagaaacaccaaagaaaaaatgaatagtataccaaaatttattcataaacctaatatctttatcactagttaatctttttggaaatccatgatgtttaagaaaataatctaaaaataatttagcacaaccttcagcagttaaagttttcacagttggaataaaatgtgacatttttgaaaatctatcagtaataaccataatcatatcatgatttgaagtagttgttggcaaaccagtaacaaaatccattgtaacatcagtccatctaccttcaggaacaggtaatggttgaaataatccttgagttttctgagtagaagtgttattttgttgacaaacaatgcatctattgcaataccttttaattgtaggcatcatattaaaccaaaataatgaatccattaaagtttgataagttttccaaggaccaaaatgaccagaagtaggattattatgagcatttttaataaatctttgaggtaaactattataacgaggaataactaatctattgcaatcttgttctaataatgttttataataaagtaaatcatttttaagttgataatgtttaatatggtggtttaaatgaataggaatttcagatttatttttcaaagttgaataaacatcagcaagtacattatcttttttataacctttaataattaaattctttaattcatcattcataggaaaagtagtaacagtaacttcagtattattaatttgaatattattatttgaatttctatttgaattacctaaaaatttaatatgattaacttctaaagcatctttaacagacaatttttcatatggataacgacttaaagcatctgcggcagaattatctttacctgcaacatattgaatttcaaaatcatattgtgataaataatcaagccatcttgcaaccctagttgaatcaatcaaattttgatagcgtagataaattaaacttttatgatcagtaacaataacaaaatgtctacctaataaataatatctccaatttttcaaagcttctacaactgccataaattctctatcataaataccataatttaattgagctcctattaatttcttagaaccataagcaattgtacctcttgttttaccattttcatctaattgttctaaagtataacctaaagcactaccacaagcatcagtatgaacaacataagtacaatcattattccattttggatgtactagaataggactgttaattaaagcgtctttaagttgattaaaagcattagtttgttcatcttcccattttgattctttggtaataaatttatgaattggtacagcaatcttagaatgattcttgataaaacgtctataatatgaagttaaacctataaacatttgagcttctttgacagtagttggaattggccaatttttaaccttttcaattttatctggatcagttttaattccatttttagtaataacatgacctaaaaatcttaattcatcgtaaaagaaggcacactttgatttcttagcaattaaatgatgttctcttaatgtagataaaacacttttaatatcttcataatgttgcttataagatttggaataaataaaaatatcatctaaataaacttgcacacatgtattcaaatatttggataagatagtattcatcatacgttgaaaagttgctggagcattagtaagaccaaaaggcataacaacccattcataatgaccataatcagtactaaaagcagtttttggaatatcttcttcttggattcttacttgataataacctgacattaaatctaatttggaataaacaacagcagattcaaacttggaaataatttcttctatatgaggtaaaggaaatctatctttaacagtgttattattcaacaatctataatcaatgcacatcctcatggttccatcttttttcttaacaaataaaacagggctattataaggactatcactaattctaataaatttttgttgtattaacttatcaacagttttggttaattcttccttttctgaataacttaaaggatattgatttctattaacttgcttattagattcaactaaaataattttatgttcgtgatttcttttaggaggaagttcatttggttctttcatagtaacaacatcattaaatttttctaaaatatcatttctgtatttattaacttcaacattattaatttctttatcaatagttttaatatcattttcttcagaggattcaacattcattgaattaatatatattagatatgaatcattatctttattattaataatagtagaaatatgtctatcatgatattcaattaaattaacattaacacttggtgttgcaaaactatctccaataaaatcatgtatatctaacttatcataatgttgtttgaaaaatggaagtcctaaaattaatttcttggtgtttgcctgcaaaactaaaaatgttcttttttctttgataggattattaaatagatcaacatcaatatctatatctagttcaccaatagcatcaacagtatcattaactaaaatagcactaattggttcaacatataatctaatcttgcttgataataacagttcatcacataaaattgtagtaatagcatctgtattggatccagtatcaataattgctgatgcggaatttttattatcaatttgtacatctatttttcgtaaattttcaatattcaaagcattaacatgtaaaatttcaggtaatgaaggaatgtttaaagttggactatttgtttcttgtttggaatcaccctttaacaatttaacttcagaggaatcacccttcttaatagtctcatctcttggaatcaccctttgagaattattaacaacagtatcaccttcttccttctcgacatttaaatgatcaacttcgggttgaatacttactggaggtgcaatataagaaaaagaactagtattattattattagatagtttattatttagtttagtaggacgagaaaaatgcatggaacgattaccaccgattggggtaaaatttgaattgtaccttttaaatggtcttttgtttctgaaaaatctttgcttattatgataaccaggtttatatttattaactctatatgggcgagaataagagcgtctaacaggagtttgatgttcgatattattgatccaaggattttttggttttgcttcttcaatatcattcaaaatagcttcagaatcttctgcataatgaatagcagcattcaaggtacgaggtttttgttgggataccatctttttcaattcaggtgttaaaccaagtaaatatcttgaaatttgaaatttagtagattcttcaaaatccaattcttgaatatattctttaaattgatcagaatatgtagagactttcattcctggaaccattttaaaagttagaatcttgtaatccatagcatgcatatcatcttcaataacaggacaaaattcttttttgaaatcacgtaaaaatctttcccaggaaatctttaaatactttggattcttctctaatttatgttctacccatttgtatgctctaccttcgagattaacaatagcttttctagcccagcttgattttgaaatacctttatcaattaaattaacgtgcaacttagataaccaagtttttgctttaagttgagcttcagtagtggagaattccttgcctttatcatcagtagaagaaccatcaaattttggaaagttagaactaagtttatcatttttagaagttttattatcatcatcagtatcagtatcggaatcagaaatatcagaatcagaattggagttatcagaatgggaattatctgaggaaaaagcatcatcaaatgaataatcagacatttcaggatcggaatggataattctaagaggtggtttaatatgtttcttctttttaataacgttctttgaatgtttggtagaatgtttctttgataattctttcttcttcttcttttcagttaattttatttccttaatttgttgctttaaagcattaatcttatctttagcagatgacatttttagttgatttaatttaattaatagatgaatataatttgatttaattaggaacacaaacactagccggtgctaccaaatgtaaactaaaatatgtaagatagtggataatacttaattacgtaatggaagtaataagtataaaataagtttactcgttggaccttttatttgtgtaatagacagcgagtagcaatgagacggttggtattaattagtagattgttctctaactaatactctgattaatgtcccctctcagaagagagttatacaaagttatacaggatatcatacttatttatattacaatattaaccattccttaatatagttaattaaactattccttatcaatcataccactccttatcataattaattcaatttcaatctaagtcattcctttcttactccgacatctccgaacctccgtatctcggaattcctatttccatcttatcatctttacgtaatcagcttacctaatcttcacgtggatattattgaacaacttgtatttattcccttacatgtgtttttaatgctgatgtcttttgtgtggatattaaatacaggtcacgtgatttcagaattttctaaaatttatcttttttgaaagattttagagttaatgtttgaaaataaaaaaaattattttccaaacgttttttttttataataaatagtcaacagatgaaaagatttataattgtagtcggcattgcaaaaatgctaaatgccaagatcatttcccaagactatacaagatggatgttgttgataatacagttgacataacaccaatgagtgcttcatcaaaacatgggaaactcatacttgatgttaagcctcattaggtatgttatttagaagaaaatcaagtgtttcaactgattaatgaaattgatattttctttttaattctgtcattggtacttcctttttactttttgtttatacttttcttcatttaaatactttttacacattacaaactattctatattaaattgaaaagaaaacaaatttcttttcttaggcagccttcagtattccttttgtttcggtattgattacacagaaattatattatcgtaatgaatctaaaaaattccaaatctacggctaatgttctctccatcattatcagcagcttttcccgatgaagcatctgaggataatgatttaaacttagtatcaacatgtttatgcatctctttcaagaaatcagaatatgaccaaattaaatcatcagatttatcttcaacaaacatttgttggaattctctttcatttgaatcaattctaaatctaactatttctatattctgtttctttgtattattgaaatgtttagttaaatactcaaccatattacgaacttgtactgaaatatgagtatctaaaattggtaacgaagaaacagtatcattagataagtcttgaatattttcaatatgtgatccaaacaagtcttgtaataataatgggttcacatcactgtggacccatatcatcattttctctccgttataaattaaataagcaccaccaaattctaaattattaacagtcaatgataaagatttaccaactcttattaaaccagtttgttcatttggaataaaatcttcttcgtctaaagaatgaatacaatacaataccggatataagtaaactgataattttgttaaattatattgtgataacttgaacaatgaacttacacgtaaatcgctatattgtattttacttttaaatgcctttgttttcagaattgatagtataaccattggtaaagttttcaaacattctggtaatataaactgatttgtttgattcagtaaattttgatttcctgcaatataatgtttatatgcagctaatatatcagatacttgcatcacgagagaatttttcagtgctaccatggtagtatttttgaaattttcattaattctttttaataaaattttaacaactgaatcttgatcaataaaattgaaaacatcagaaattctttgactaactgataagatcatattgataactctaacttttcttgaaccatctttagaagtatataagaaagctgcttgaaaatgtgcatctttcgttgtgtttaattttgaatcataagtgaaatcacaaacaattgaagaatcactggaaactattggaatatttggtgctaaatcacctgtaatcgtcttgaagggaccataataatttttaacttgtaaaccatgggaacaacgaacctttaattgacattgataacctgcaatattttctataactttgttgatttcaaatatcaatgatatttcatcggtttcataattaaatggtaaccattccttaacagtaccacctgtattcgttgcaaatgaggctagattaattaaatcaacattggattgtgtagcaattaataaattaacaccaatattatccttaacaaattcatttgacaagtctgaataaaatttattatcaaatgtgaatgtttccttaatgtaatcattttctaatttaccattacttgttttcaccattaaattaccaggacctaatgatggaattgttgataagacggaaataatttgaccaccaccaacttccttgagtaataattgtgctgcttttaaagctgcgccaaatgccggttcaggagctttgtaactatcatttgtttcaattgcggttaaagttgaatcaattatattaaatgattcatttggatcaacaaacgtaccatcattgaatgggatgaatggatcttctaaatcagtgactaatgaaacagtagttttttgtaaatctggagataaattgaagaagtgtattttattatcaaatccaataattgaaattttagcaccaggtggtaatttagatgaaccgtcatcattgaatagtgatattctaattgcagaacagacagtttcaacaacttttaaatgatatgaagagtgagataaatctaataaaaatattctatgaagtggattatttgattcaatattttcattaagattatattcctttggaacaacataatcaataactgcagtatttaattctggtctaacatgataatcatcccttataccattcattccaattgttgaaatatattcatttggtagaggagaagagaatccacaaatattacagatcatattattatcagtatattgcattgcaggatttaaataagcacgacatcttctacatcttggaactgttgaaccttcttcaattttaacttgtttaatattcattgattcagtatttgattcaatatttgattgaaaatcagcaaatggtcgtagaacaatacctaaaggaattttagttttttctctcaactcttcagaaaatggaatactatacattgaaactcgaccaaattgaggaacaacattaccttgatcaattgatttatattcagttcctgcaaatggaggtaaaacatgttcaaaacttaaaaattcttgattttcatatatttcattcattatatttcttttattagaaattgataaatcatcgacaactgatacttcattaatattataagcttcagaagtaatagtattgttgttaatagtattgttattaataatattattattcaaatttgaaggttgatcattgaaggatgcaacattattaacaaatggtgaatgtatacttgaaactgaaggtgattgttgaacaaattgatttggaatttgatgtgagaatggagatccattgataacagatgcaggactttgaaactgattattaaagggaagtgttggagtgtttaaactagacatagaagaagaaaattgaggtggatacagaccaattgcagcttcatttggatcaatatttggatcattaccatgaattgaattttgagaagtaaaatcatggaatgcatgcagccctctctttttcgatttacttttcacattaggagttccacctaaagatatactttgtatcccatctacaagatcaccagacatgtccaacagatgattattaacagaaatttaatccaagatcaatattttaaggatcaatctgttgataaataattatattccattctattagacttgttaactctctagttatgacttacgtaataatatctaataataagatctactcaaggatgatttctctatatctatataagaatctatataagaagaactacataactattagttcttcccacatattatatcctgtgggaatttgccctcttatacatatctcatgtaacgagttgccccgttacctatattatgatattattactatcaatatatcatttactaacgtaatatatcttacgtaattatattctatatttatatcattcctgacacattcatgttgacaatttgaagatgaaaaagtaaataggggaagaaatcgcgaattttgacgcgctctgtgaaaaaaattgatgatttggtaatcattgtggagaatttgacatctttttggcgttgtttacattttcttgattatttctttgtcttgaaggagttgtttattttctaatttattttttattctatccatcttattttatcagtcaattacaggtatagcaatgggtgtgtcaggtctattaccgatattgaaaagtatccaggaaaacaccactttggaaaggtatcgtggtcaaacactagctattgatacttatgcttggttacataaagcttcgtttacatgtgcagaggatattgtaatggaaagaccaacaagatcgtatattaactatttcaataaaaggattaagatgcttcaacattttaatattacaccatattttgtatttgatggtgattatttaccaaggaaggcagctgttgaaaaggaaagggaggaacgtagaaatgagtataaaaaattagcaaatgatgcaaaggcaagtggtaataataaattagcatttagtcattttcaaaaagcttgtgatatatcaccagaattagcaaaatctctaataaatgaattaaaaatgaaatatattaaatatgttgttgctccatatgaagctgatagtcaaatggtaatgttagagaaactaggtttagttgatggtatcattagtgaagattcagatttattgattttcggttgtcaaaaattgattactaaactaaatgatagaggtgaatgtattgaaatcaagagggaaaattttgcaaattgtaaaggctcatatattaactgttttaatgatgatcaattattattaatggcaacaattagtggatgtgattatacaaaaggtataactggtattggtattcaaaaggcaattcaattaacacattattttaaaacttatgaaagagtgatgatgaatataaaagttgaaggtaaaccgattccagaagggtttgatgatgaatataaaagagcaaaaattgcatttaggtatcaaatagttttcaatccaattaatcaaactgcgcaacatttaaatccagtagataatattgaatttgataaagattatctttatcaatgtacagggtttttattggatcaagaaatacataaaaaaattgcaacgggtgaattagatccattcagtaagaaagttttaatttcttgggataataaagttagtgcaactgccacaagatcactatcattacctgtcggatacaataataataatagtaataataagtataataggtataatatcaataatactgtcaatgatactatacttactaataatacaccagatatttatccactcagattacagagatcaaaaactgagaacatagtgatgaaacgaacaacagaaacaccacccattaccaaaaagaggaaatctgctatgaaaattgatcagtttacacaatttatacgtgataaacagaatagcaacaacaaagagaataatatgcgtaataatgctttatcaacaaccagtaaaagacaaaaattattgaacaagaatgaaacgggacaacctacaataagtaaattttttagtcaaggtattagtataagaaatgagaaagttgttgaaaaagatgttgaaatcaaaagcaatgaatttaatgctacatcgtcagatgttgaagatataagtgaagaagagattaataatttaaatatgaaattaaataatggaattaaggagactcaagatgatatactaacatctgatatcgaggaagaaagggatcataactctcttagcaaaataaggaatgaagtaaactctagtatttcagaaaatcaaagtgacgaaacaggatcagatatggaagatattataaatagttcagacatatcacagagtaccatcaccatggataaaagtcttaatagaaatacaccaacatcattgattatgaacaataacagttcgttaactatgagcacagatacagatattggagaagttaacactgaatacttactggaagttgatgataaagatgaagttgaggaagatggagaaggaagtgagttatgtaatagaagaatgcttttggatgatagtaatacagagtcagaaagtaatgaattagttgataaacagaatatgttagcagagatatactcatttaagacacaaagcagtaaccataataatcataataatattatgaatattaataagaacagaagactgattgatgaaaatgaagagaataggttcaatccaagtaaatggatgaaaacgaaaaaaatcaataatagtcatcgacctatcaatccatcaccactacaacaaagaactgcattacaggatgttaccaatggttcaggattaaaagatgcaggattaaaagatagaggatcacgactaggacgcagtggattatcaagattcagataccaagagtgataatacagttataattttaatagtgtgtatagttaagttattatatcgaattacgtaatgatgttttgataaggagagcttagttttcctaaataggaaggcgtggattaccgcattgggaagagccataaaatgtactcaatcaatgtaaatttagcgtttccacatgtggttttcgaatccattgggtatatggacagagagaatacaatgtatttaattaattaagcagtgtatacatattgtatatacaccaactgcaacctataccaaagatagagggaatgggtttgttatgagggctggtctctatcataataagggaataaagacccaccctcgcgattcattgataaatttatataaggagaggtttcgggacaaaagtggcgatttctgctgtttgtcgaaccttttccattaacttgtttctttcttttactttttaaagaataacaaccttattcaattgaataattaataaacacaatgcatagaacatactcattaagaacagcaagagcaccaactgcttcagatttacaaaatccagttccagttccagtttcatcaactaaaactccaagatttttcggtccaggtggtttagcatcatcatttagaagaacaactgcaggttcatttggtccagatctttcaagaaaattagctcaattagttaaaatggaaaaaaatgttatgagagcaattgaagtttgttcaagagaaagaagagatgctgcaagacaattatctctttggggtgcagataatgaagatgatgtctctgatattactgataaattaggtgttcttatctatgaaattggtgaattagaagatcaattcattgatagatatgatcaatatagaattactattaaatctattagagatattgaaggttcagttcaaccatcaagagatcgtaaatataaagttactgatcaaattgcatatcttaaatataaagatcctcaatcaccaaaaatcactatcttagaacaagaattagttagagcagaagctgaatcattagttgcagaagctcaattatcaaatattacaagagaaaaattaaaggcttcattctcttatcaatttgattcaattagggaatatgctgaaaaagtcgctcttattgcaggttatggtaaagctttattagaattattagatgattctcctgttacacctggtgaaactagaccttcatatgatggttatgaagcttcaaagcaaattatcattgattgtgaaaattctttagcaaactggacttttgaaactgctgctgttaaaccaactctttcatttaaagttggtgattacgaagatgaattagctgatgatgttaatggtttatcagttgaagatcaagaagcttggaatgaagaagatgaagaacatcatgcagttgctgcttaaatttctcctcgtattcaataaaccaccctttttcaatcaacaaaataacattcattcaattctctacaattttattaataataaattaatattatattagttgtttactttacttcaactttactttactgaaacattttattgattttttatcgattgttattatttacccactattttattttattttactttattttatcttagctttctctttgtattcttcataagaaatgtactcttactgttataaattaataatatataattatcagtatctaattctcaactattaaacaattaaacaattcaacaaacaatatctgaatttgattgattaactcttccaatggatatggatgttcaaggatattggacatatggttgtcttatcatatttaaatatcaagttagcttttactaattcttcattattgctatcactatcatttgcaaactcatccttcaccccattttcatcatcatcatcatcgatatttatagtatcttttttatgttgatcaaattcaagtcttcttgtaagtaatttttcacatctcctccagtgttgagtacctaaatgataatcataaccagtaaaccaattccttattttaacgatttcatcccaacttataattagttgacatttacatgattcattactcaaggataattttaatttttcatttgatttattcttacccttttcattactattatcgttacaaattgaataaatttcatcttccgttaatttaaataatattgaaattaatttatcctttgtagttggattattataaatatcattaacatgtttattagaaataagaattttattatatttagtcaatttcaatgatactttatcattagaatcattattaattgcaggtgataataataatggatgtttaacacgatttttctcaatctcagctctattggcaaatgtccttacatttataacatgatttctcgttaccttaatatgtgatcgtctgtatattccggttagtatttgtcaatgaagaagagttattgtatatgatgatataatacatacattggagccattactgtgatccgttaacaaagagaaactggtgatgattaatatggagtattcaagtttttgatgtaaggtacaattccgaggggttattaggctatataatactgtaagagaagatattatcggtatattgtatgtatgtcttcttctgaatcttctttcattgaataatatatcaccaaatgcaaccatttatacatcaatctggcaatgaatttgctataaatcttgccgcaaaggctaaggagacaggtgttaccacaatgtttaatgatgatccacaggtttcagttgataaatttgatttttataaaaaatattcattctttcatccagatactaacaaggatgatgctaatgcatttgcaacattagttagagaatgtgttcattttgaagttgaaacagttgcaagtatgttaacatttggattagatcttaatttagtttatccacaaattacactttcatatatttacagaagttgtcgttcaattttaagggataaatataataatacagatgatgcatttgcacaagagtttgcaagagaacttgttagtcaagtatatgcatttatcaaacctaaacttgacctccctgcaatgtcatgggaaggtgtagaagcgaaagttatttgaagccattgggaatttcaacgaaaagtttctgagccattatacacttttagctataatatgttcttttgtaattctgtaaatataatataatattaaggtatattataatataactctaaatatcaataacaatggatgatggcgatgggtttgctcctataactgcaatgttttattctgttttccatccaactgagggaacaaaagtaattcatcaagttccaagtggtgcaattgtaccatcaattaatgatgataataaaataaataatagtttacccgattcatcatcatttgaacaaccattatttgattttgatataattaaaaattatgttataccaaaacctggtttatgcaataaactgattactttaaagattgaaaattatagagtttgtggattccctgttaatatttatgcaccacaatatgctagaaattcatttggatttaatttctgttttgttttcccatacgagagtgatacaactccttatgagggtaatattaaaagaattggtaagatgtttagagcattagaggaacagagtcaacttttatcaaaatctttaaaagattcaacagtttatttccaaaattcagtcaaagttaatgaggatagtattaatgaagagaaagaagatgaaaaggaaaaaggtcaagatcttttattttcaaaagataataaacaatatttgaaaattgttgatgattggggagattcaaatagacaattattagttgataaacaagcacctggattaaataagaattggcaatcaaaaatttcatcaattgaatcattaattcaacaaatttatcaagacttaaataattattcagaatgtatgatatcaattgatgaatcaaatactgttgatttgaaacttttcccaatttctccaccaccaccaaaagtttacccttatgatgtaccaatcgaattagttaatttaaatttacttattgatccattatgggatcctacaatgttgaaaattataccatttataaacggtataaattcaattgcacaaataagtcaattgtcagatgttaatatggatttaacaaaacaatgtattagacatttacttcattataaatcaatttcaataattgatattttccaattctccaatagatatttggtatcatcatcaattagagaattcttaagtgattctaaaatgtatagagcatgtcaagaatatgttttcagttctaaaggtgtttttggtgatattccaattaagaaaattaaaagtgaagttttcaaagatgcagataataataaaagtgaagaaactattgttaaatcattaccaagatcatccaatacaaagcctgaactacatactgttgattcatcatcttcaagtggacagtttaagagaaatattaccaaaattgataaaattaaattaccatctaaagttacacttttccaactttacaatgcattaaactccagtgaatcattatcacaatggtgtattgataatgagaaagatttgacaaatatcgatataaggaaatttattacatttggattatgtaatggactcatagctagaatccatgtatatccagtattcagaaatgacagaagtgtagaagataacaaggataacgagatgatacaaatggtgaaggacactcaacacttggattcactgtgtacgaggtttcaaatgggtagagatcaaatactggagaaactcgcgaaatttggcactgtggaaagtgtagagcgttaacagttaaggcagaggaagaggaagaggagatttttccaaggaacgttatttttttttccctttgtttacatttacaactataactggtttcatattggatatatactaattgggtgtattagcaacaatgtttagacgacagagcggtagacgtggtagcttgatgggtgggaattatggtaataccaataatggtagactttccaatgtatctaatactgcaacaatcaatgaagatgttagtctgtttacggaatcaattaacgtggttgtacgatgtagaggaagaggtgtacgtgaaaatgaacttaacagtccaaatgttgtatatacatcaacagatagaccaacagaggttcaaataaatatgttagataataatcataatgagaatagcaataataatactaatactaataatgatgataagaattcagatatttcatcaactaaatataaaacttataaattagatcatgtttatggaccatcagttgatcaaatgacatttttccaatctgctgctgaaaatatttgtaatgattttatcaaaggttataattgtacaattttcgcatatggtcaaacaagtgcaggtaaaacttatacaatgtgtggtaaaaataatggtaatctattaacaccagaaagtggtataataccaagatgtttgaataaattatttgaagatttgaaaaagaataaggataaagatgatgtagatgatgaaaatatacttaaatgttcatttgtggaaatttataatgaaactttgagagatttattaagtgatggtaataatgataaattacttaaaatttatgaaaaggataaaattataaaaattaactcattagaagaattttatattaaagatttcaatgaagcaatgaaaatatttcatatgggactaaataagaagaaaattgcatcaactaagatgaatgaaaattcaagtagatcacatacaatttttacagtttatttaatgaagaaaaaacataataacaaatcagaatatcaattttctaaaataaatcttgttgatttagcaggttctgaaaatattaatagatcaggatcaatgaatcaaagagctaaggaagcaggttcaattaatcaaagtttacttacattaggacgtgttattaatagtttagttgatggatctaatttcataccttatagagaatctaaactaacaagactattacaagattcattaggtggtaaaacgaagacaatgttaattgctaatatatcaccaacattaattgatctaaattcaagtatatccacattagaatatgcatcaaaggctaaaaatattaaaaattcttcacaaattggtacaattataaatgaagattatttattgagtgaaatgattgaagagaatagaaaattaaagttagatttaatggccactaggaaacgtgaacattgtattataatggatgaaaataattataaagaaatgtatttgattcaaaaaaatttaagggatgaagttgatgagttaaagggactaaaattatcattaatgaaacagttagaatttcaaattaataaaattaatgttgaaaaggataaaaatgatgaattagttaataatttaacaattttagagaataaaataattgaatctaagaatataataaatgaaaatatgcataatgaaaatactttaaaacttaaaattgatcaattaactaatcaattcaatgaaaaaatcataaagattaaaaaacgacatcataatattaagagtatattaaataataaaataatgaatcaaattaatttgttaaataaggaacttaatacagataatgttataagtatgaaaagtctaacaagtttaaaggatgaaataaataaatttgatgaattaattaaagaaattaacaataaaaatgatgaatcaattgaatccatgagtagtatattaacttatattaataattataagaataataatgaaattgttgaaactcatttaatgaatatcaatgccaaatttgatgaaaagatgaataatgattttaaattccataaatttttaaacaatgagttgaaagaggataagaaagaagaacttttcagtagtttgaatgataatattaaagatgtcgttgatgaatttaaaaaagagatgaatgaaaaaattagtttactaatgaatgaaagttttagtgttaattacaaacaatttttaaagttttatcaagataagattctcaccaaggataaagaatgggatgataataatacccaaaatatgaaagagatacaagaaattcatggatctttaagcaatgttataaaatcaggtaatgaagaagttcatggtgtttttggaaatatacgaaatgctgttaaagatagtgtatatgaagtgaaggataaagtaaatgaagtacgagataattttaatattgttaataagaatattgaagaagttgaagaagaaatgaaagtacatgaaaaatatactagtgataaagtagataaatataaggaaactattactgaacttggaaaaaatattggaactattctagaaaatcatatggtagaggaagaagaaggagaagaggaagaacaggaggagaataatgataataaagaagttttaaaagtagttaaggataattctaaaaatatcatacgtacatcatttggtattaagagagaacatagtatggaatctggtttagttaaacgtcaatgtaatgaatgaataaacaatatgtataataaatataagtgtaagagtataagaatgagtaattattaattatttacatagttgattaaaaaacttaaatataaaatttagttatagatcttttttatcgattgaactttgttcagagatacttctcctaaacatttctaaagaattattagtactaatactagcaacaccagaacttgatctacgacgttgtcttcttgcaatatttggttcaacatgttctttacctaaagttttagctaaaagtgataaaatatcagttaatgataaaactccaactaatttaccagttgcatgaatatcttcatcattatgataatgattatgatgtggactatgattgtgattatgtgaatgattatgatgttgatgttgattatgattttcatttgaattattatttaaatctggtttaattatccataatctatgagattttgttgcaactaattttgcaattgctctacctaatgaagttttacttgtaacatgaaatattgggaaagaatctttaccattttctaaacctcttgaatttaatataactgaaataaaatgtaaacaagatttataaagtaaatctgattttgaagaatttgaaactaatttaacatcagttacacttatattacctaaaagatgataatttctatcaataacagccaatgaactcatttttaagttatgcattttcaataaagcatcaattaaatattcatcaccgaaaattgaaattggatttgatgaaccaatatttaaagattttaaacttgaagataataaaggttccattgaaggaaaacggcgtgcattatcccataaaaattttattaatcttctttgagataaaatacctgataatttttcacaattattttcattatcatttttcaaaattgcaattctatgaacacctgtacctaaaatttctacaactgttgataaagtatcagattcagttaatttaaagaaaggatttttatttgttaattttataacaaaatctactggaacttgattacccatttgagcatttttaattaattttggtatattttcctttggagtataatttatatttttcaaatcatcaactttaattttatttaaaactaataataaataagtatttaaatcagtataatcaaatgtaagacataaaccttgattattattattattaattgataaatcttcaactggtagggaagttaaattatttttaactaaaacatcaaaagcttcttcaactgataaatttgaatttataatgattaatttatttttttcaattaaatcagataaaggtatattttgccattctaaggcaacattatttagagatggaggattatttattgaaattgaagaagatattgaagtatttcttgataattgaggagataaaggtagtaatgatgatgaatcattagaattgttagaattgttagaattgttagaattattattattattattattattattattattattattattattattactatcattaattgaatttgataaaattgaagaaattgaagaagttgttggagattgagggaaagcaattgaaattgaatgaggggtatttggaattgattgttgagttggagaaggattattaacagtattagaattattattattattattaatattattatcagataaatttgaagaaatatcaagatttgaaatattttcaagtggattatctaaaaggggaggtgaagataacatttcaacaattgaagtttgtcttgcagattgagaaggtgaacagggggctctcattgaaggtgacattggatatttacttgaaggcattattcaagagtatatatgataataatatctagtattaaagcaatatacaatatacgacctattatacgattacagtagataacctatataaaattaaatcgatattaaataattttctaattaattttttatgtgaccataatttactcattattactgttactatgggggaatggatggattactggaaagagaggtcgatgcatcgataataataataataataaaatagaaaaaaaaaagaaaataatgattacgtaacaaaacattacataatcacacacttacgtaatgcgctaattttgcgtttattccattacgtaatgaacaatgagatcctattaaattcaaacggataaatcggaaccacggcaaaaaagctggaaaaagaccctcttttttttcctattcacttattaattaatttaagcggcatctctaatatccgcttctattcccacatttcctataggaggtaatacaccttattataccttattataccttattattataccttattattattattatctaccctttaaattatctatttgatactatggccgtacgaaatgaacccttgttattctattttaaattattttaattattttaattatctcattacctcatatttattttatatttaacataacgtatatccccatttcaaatcttctgcttctttctctgctggtatcattcatctttattattataccccctctacttccattataatatatctaatatcattattattatatttttaatctatctttatactgatgtctttctctattaatcattcatcaacaatgtctttacagaactatcatttgacaaatcaaaatttattctatcaaaattcaataaatacttcagtacttccaccattatccgccaatataggcgcgtcaattaataattataatattaatatgaatatgaacagtatgaataatatgaatacttcaaatcaagttaataataattccttcaataattcacttaataattcacctagttcatcaatttcatcagcttcatcaacatcttcaatattatcatcaaattcaaattctcaatctgattcttcttcattaccttcattatcttcatcttcttcattaccaagtcttgattctgtattatcgcgcattaattcatcccatccattacctttaccgttattaaaaaatccatcatcatcatcatcatcatcatcatcatcaaaatcatcctcagtatcaccaaaatcatcaaaatcaaaatcatcaaaatcagatatatcggtatcttcaccaccaatacggaaatatcaatgtaaattatgtgataaaaaatttacaacttcaggtcatttagcaagacataatagaattcatacaggtattaaaaatcatatatgtccatttgaaggttgtaattcacgtttctctcgtcaagataactgtatgcaacattataaaactcatttaaaaattaagaataaagataaagataaattatcgaaaaaatcaaagaaagatattatttaactaaaaaatgtctttattcaaacaaatctctctattattatacccattttctatttttatttaactcccctttcttctatgttattgtaattacgaatgaaacttatataattaaaataaaatataaaaatataaaataaaaatcattaaaaatcattaaatcatgccattgaaacagtgaaattatattcaagtactacagagctatacgactgaaatcgcgttactttttattcgcaaatttgtcattaatattttgatttttcaaacttattttataaattaaaccgttaatccactactattcctctcgtataaatctttggaaaactattattattagttcttcatttaataagaaattataatcttaaaccatgtcagtattaaacccatcattacctgtaagagaacaaatggaagcacttattcgtgcaaaacaattagaaatttgtaaaggtttagaaactttagatactaaaaaatttaaagcagatgaatggactagaggtaataatggtggtggtggtaaatcaatggttttacaagatggtgaaacttttgaaaaagcaggtgttaatatttcagttgttcatggccctttacctcatgctgcaattgaaaaaatgaaaaatgatcataaagatattaaagttgatcaaaatggtgaagttacattctttgcttgtggtttaagtatggttattcatccaattaatcctcatgctccaacaatgcatcttaattatagatattttgaaattttaaataatgatggctcagttcaaacttggtggtttggtggtggtgcagatttaactccttcttatctttatattgatgatgcaaaacatttccataaattacataaagatgcattagatccatttggtttagaactttatccagaatttaaaatttggtgtgataattattttaaaattactcatagaaatgaaacaagaggtgttggtggtattttttatgatgattttaataaaattgatgctcaaaaatgtttagaaatgtcagaatcttgtcttaatgcaatgttaccttcttatttaccattaattgcaaaacgtaaagatatgccatttactgaaaaggaaaaagaatggcaacaaattagaagaggtagatatgttgaatttaatttggtttatgatagaggtacaaaatttggtttacaaactccaaattcaagaattgaaagtattttaatgtcaatgccaaaaactgctacttggttatataatcatgaacctgaggaaggttcaagagaggcagaattattaaaagttactagaaatccaattaattgggtgtaataatatatcatgtatttatgtaagtaatttgtaatgaacgttaattttaatgaatttagaaatatatcgatagagagtagaaatagaaataaatttggttacgtactgtgaaaaaaaaatattcaggtcaacagaaagcgtgtagcttcttcatgtaaaaatacagaggttgttgttttcaatatactattgaacaacggataacatcatgtcacgttcacgtgctaatactatagaagttaatactccaatacccatgatgatgacggtcgatgatgaaaatgaaatatataataatgataatgatagtaatgatattattattattgaaaaaccaaaatctttaattaaaaatttatacattcactatccaaatcttaatataataatcatttcaattattttatggtatatattatcaatgacgatatcagtttataatagatggatgttttcaactgaaaaattaaattttaaatatccaattataataacttcatttcatcaattattacttacattcctttcaataatttcattaataatattcccaaaatttaaactaaatacaaatactaataataatagtacaggtgaaaaactcaattatataatacccttgaaagaatatatttctaaaattttaccatgttcaattgcatcagctggtgatattggtttaggtaatacatcatttagatttattacattatcactttatacaatggttaaaacatcatcattaatatttgttttattatggggggttttctttaaacttgaaaaattaacatttaaaatatttttaattgttattgtaatgattggtggagtttcaatgatgatttatggacaaaatgataatcatagtgaaataattaaatcaacaaattttgtatttattggaattttattagttttaatttcatcatgtatgtcaggtttaagatgggcattaacccaaataatgttaaaacgtaataaacatactaaaaatccaattttaacaatgctttatgtctcacctggtatgtttatatttttattaattgttggtataatagttgaaggatttaaaaattttctcaatgcagatatttggttaaataaaggtacattaattacaatcattttaataattataccaggatttttagcatttttaatgacaatcgcagaatatacattattacaaaatgcatcattacttacattatcaattgcaggtatttttaaagaattattaacaattttcgtttcatgggttatatttgatgataaattaagtttattaaatataattggattaattataacatttagtgatattatttgttataatatttacagatataatgaaaatgacaacttaatgaagaataatcaattagataaagttgataatgaatttgttgatattgaaatggataatgttgtgtataataagtagtctagttacgtaatcagcgcttatcagatattaattacctaaaagagaaggtcttcgcgatttttatcagagatcgtcgaaattattaaatcgtcgataagtaagtaagaaggagtttaaagattgattgaagtgcaaacaatcagtggagaatttcattttactttattttattgagtaatggcgaaaaagggtaatttagattatacatatggggagacaaccaataaggttgttaataaaattaatgatgatgatggtgatgataaaaattctgatgatttaatcataggaagcagaaaaagttcattaataaagactcaaaaaaagaaagatgaagaaattgagaggagaaataggattagggctaaagttaaaaaaggtaagtattttggatatgaggaaatacttgaaaaagaattaaatgaaggagaggaaggtaacgaagaaggatttgaggtatttgatgaaagtaaatggattaaatttattggatttttaacagttagaatagtttcaccattattactcatacttcatgcattatcagttggattagttttatggttagtatatcaatttgatttcagtgataaaggtacgttatcaaagagtaatgcaatgccatggatcatgggtacattatcattcaatgtatttttagttcattatgtcagcaaatcagttttcaagaatacctactataagaggcgtcctgtcccactatgatataagttataatacataatacatgatcaatttagtgtggggatagtacatagtagatttacgtcatgattacctagtgcttagggactgtatccttatctatactggatatttcctgaatattcttcttagtatcttaatattttatcatatatcatatcatatcatggactattcattatgcaagggtacctacccctatcctgtcaatatgtgacatttttatacgcaactccgaactatttaaataggtgtatcattcctctattaagtacattaacttatctatcttactttaacttaattattttaattttccttttttctttatcttatctatagacaaacaaacaaaactaaaaatgatgaaaactactactactaccaataacacaactgcaatcgataaggaaattactcaaaccactaccacttcttatttgaataatgatagaatcgatgaattaattccaattcctaaacgtaccgatatctcatgtttatcattgactgatcaacttataagtgagtatcctagtacttgctcttttaaaaatgtatttaatagcaatagtaatataaatacttccataattccaagatctagtggtgcattaactgactttaattctttatctaaaatgatgattaataataataataataatattactgctaaaccacaattaattaaccataaaagaattgcatcatatgttttcgcatttgatattgatggtgtcttggttagaggtccaaatactcttaatgaaggtgttgaagcaataaaatatttagaaggtaataatccttataacattaaggtaccttatatttttgtaacaaatggaggtggtaaacatgaatctttaagagctgaagacttaagcaatagattagaaaccaaaattgtcgaagaacaaattattcaaggtcatacaccaatgaaggaattaagtaatgaatatgataatgttttagttattggaggtgttggtgataatgttaaaaaaattgcaaaatcatatggttttaaaaatgttttcacatcaactgatataatgagatggaatccatcagttacaccatattatgaattaactgaagatgatttaaaacattgtatcaatgatgaagtttatgactttagtaaaattaaaattgatgcaattttagttttcgcagattcaagaaattgggcagcagatcaacaaatcatacttgaattattaatgtcagataatggttatatgggtacaatttctaaagataatttcaacaatggtccaagcatttattttgcacattctgattttgtttggtcaactaactataacttagttagatatggtatgggtgcattacaagtttcaattgctgcattatataaagaacataccggtaaagaaatgaaagttattagatttggtaaacctcaaaaggcaacatttgaatatgcaaataaagttatgaaatgttggagaaaaaatgttttagataatcattttgaagagatgtcaagtattaataatgatgataaagatgattcaatgactgatattttttctaataatggttcagaatataaatatgctaataataataccaataccaatacaagtatgagtgaatcagatgaagatgatttcaatgataatgataatgataatgaaggtgaatctcataatagtttaacatttgaaggattgaaaagaatgaaattgaatccaattgttgaaaaagttttaccaccaccatcaactgtttattttgttggtgatacaccagaatctgatattagatttgcaaattctcatgatgaatcatggttttcaattttagttaatacaggtgtttatcaaaagggtacagagccaaaatataaaccaaaacatcattgtgaaaatgttttagaagctgttaaatttgcagttgaaagagaacatgctaaagaatgtgaagaatggaatagagattcaatgttttagtgttattgcaccctttcaataatacatacgcataaatgcataataatagatttaaatatacattatgtaaaagacttttttatatataccttgcttttttttataaaaatacccaataattgatgacaatattaatgatagcaaaaaattaaaaaaaaaatacatgtgggatttttacctccaaaagacccttggaaatagcgaaaaactgttgcacatagccaacataaaatagcaagctattagtcgccactgtttaattaattttctccagaacaaggaaattttcccaagttccgcattaatctctcaactggccaaaatatggggccctcattaaatttctattaatttaattttccattgcatcaagtatacatgataaatttaaacgaatttacgcacagaataaatatttttttgctaaaattactaagtgatgattatacgtagcacttgacaaactcggcagtatgatcggtattttctccgttcttagttaaattgaaattgtccgttaacccccccccccccctgttcccacttccggttccggttaaattattagtgataaatccgtaattcgagtaattgttaatgcaccttattactaagtgtcaaactttactaaaagaaaataatagaagagtgttagacttaaacggacaccgataattaaatcttcaggttaaaccatgttcggccacacttaggggtttaatgttacctataatgttacttacactataaatatatattcaatttaatatgtaaacaactaaagtaatagagttagtttaaagctctcaagtaaaaccgtccacgtttagatttgcagtatctatcaagatatgatacagtatcaattaaatttcctgtttcaattgtggagatttgtaatctttagaatcactttaatgtctcaatatgtaaagataataaactatcaaatcaaaataattatcaatttagcaatacctctaaatttgctgcatagaatatctcgcatgatcccattaatttttttttcattctttgtattaaaaataacgctcactttaatatatagatcacattgtattgtgattttaatattatcactattatcaatctattgtgttcgggatttataagtaactagacatccccgttttttttcaattaaatctttgatatgtaaattaatgataaattgataccttaactgataataattacatcaactaatctaatcttatcaaataaaaggtttgaaatacctttaaatataattcataaagtgtggtatttctccttaattgctacaggagcaacccatccaatataatttatatacacaaggttgtgcaaattatacgcttaacaagcaatatatacaacttcaattaataatcttcatttaccaccttgttgtcatttcgtataatagtttcgaatttcaattgtgaaataagactctctaaaatatataaatatcaccaagtatacgtttactcaattacttaaaactcaattgactcatttatatcttcttagaaaaaataggaagcaggtgttcattctttcaaattgagctagtttaattaaagtttagatcagagaaagaaattaactgtaatatcttatcaatactattgttaataactgtttcatacataaattacatcttaccattcaattatttatttactcacctattagctcgtttactcaatcaattatttaaacattcattctttgatcaactcattcattattactttcagattcaaatatatcaaatgtcgaaacgtaaagaaacttctgattctgaagatactgaggatactaaagatactgataaatatgctgaaaaatctacatctcacactaaaataaaaagtagtattggtaatacagataaaaagccatatcaaagaaaaagagcatttagtaaaagaagtaaatctggttgtttaacatgtcgtgaaagaagaattaaatgtgatgaatacaaaccagtctgtaaaaattgtgttaaatctagaagagcttgtgcctatccaaatccagatataaaaaagcaacaaaaattcaatagaaattattataatactaatgataattataataattacaatggttatccaaagaactcacctataagttcaaatgatttgaattctaaatcatcaatttcacattcacatcaatattattttgataatgttaataataataacaacaataatcaaacctatcaatatggaccttcaaataatttgctttcttatcaacaatatagtatgactccaatttatcctaatcaacaaccagttttacaacatccatttatagattcaaatacaaattttaaaaatacaaacccaaatttaagtccaaatataagtccaaatataagtccaaatataagtccaaatataagtccaaatctgaatataaatacaaatgcaagtacaaattcaaatagacaagcacctggacctatatctagacattcacattcaaattcaaactccagtattaacataaatactaatccaacgttatcatatattgattcaaatgctcaacagtattatcaaactgatcccaatttaacttatcctacaaatccaccaataaatgattcatcaataccacaacaacaacaatattattcacagtattctgatttttcatatggtggctatccattaagtataccaccaccaacatcatcctcagtttcatcatatcaatcatatacaccaatgtataatccaccaaaacaattcccatataattcaccaataatttcgaataactaataatctacctgtttatcatcaatcaaattaataaatcaccaaatcaaaccccaactcaaaccccaaatcattcacccaatcattcaccaatttactccccagttaaatcattctaatggattccccatacaaatagttggcaccaaattatttcctaacattgaaacaaagccgaattcttaaagtttgattatagtctacaactttactactacttaaacacttatgacacttataataatacaatcttacacattccatatatatatatatatatatacatataatcacataccttgctttgtcaccttacgcttaattacaaaatacacggtatgttgtattattatatggatcttttgcttttcactcttataaaaatcacaagaacacgttttatatttatatttatacttatactttccatcatcttttgcttcttacctttttattgtttcctctcttcaaaattaatagacacgatagacaatcaatataattaaataacacaaaaattaatcgaaactgaaaatggtagcaatcaataattgcctaacacgcaccactacttgctcagaagcagccattattatcatcggttttttttttaaattaaatattttgctctcaggcttgccgataattcataatccggggatgaatttccgctgagggatgatggaatttgaagattcaaagtatcattaaagtgatattcactaactcatttaacaatttatttatgaatgaaattgtttatactattagtgctgatcaatggaattaattcgttgaaaataagaggtgttcctgataaatatgcagaggattataaagctgatgaaaatggtctctggagatgtttgagtgaccctgaaattatactgtcaattgataaaattaacgataattattgtgattgccccgatggttctgacgaaccaggtacaaatgcatgtgataatggttcattctattgtgaaaatattggatttaaatcaaattttataccaagttataaagtaaatgatggaatttgtgattatgatgtttgttgtgatggtagtgatgaaattgatggattatgtgagaataaatgtattgaaatgaaacttgatcacgataaatatgttaaggagttcaatgaaaatgtcactaaggggttgaaattaaagggggaatatattacagagatcaattaatgaaagaaatcgattagataatgaaattcaaagaagtaacgataaattaaggaaactagaggaaaatatagaattactgaatacttgaaaagattaaattaaatgaaaatgaaaaacttttattagaaaagtttgatattattgaaaatgatgtcgattcattatcatcaagtttcttaaattcaatgaataaaatgaataattatgtttctaaattagaggatttggaacatattttacagagaatgacattagaatataatcataatttcaatgatcccgctgttaaagatgcagctgagagttatttaaattttgcagcttcaattgatgatgataataatgcagaaaatactagtcaatagggttaaattatctgaaattataggtaattttaacgaagtattgtcaaggacgaaatttgatttaaacaagataaaggaagaaatgatccaatttacaaaggatgataagaagaaggacaatgttgaaaaaagtcataatatctgggatatcattcttaatagctttataggatatttcgaaaatgttgatacgttggaaactgttgaaaatttatctgatgttgaaatagataataaaattaataaattgaataaagatattaaaaatctaaagactaaaatccgtcaatctgagatcgaattgaataaaaattttggccctgatgatattcttagatcaatgaatgaatgctatactaaaactatgggtaaatttgaatacaaattttgtccaaattctaagatcgagcaagttgaaaaggatggtaggacaatgaaaattgggtttttcaatgatgttgaagttatcgataatttaggtaaattcaatatcaatttcaaaaaaggtgagagatgttgggatggtccaatcagagaggcagtagctgaattaatttgtgatgttaaaactgaaattttatcagtaactgaacctcaaaaatgtatgtatcactttaaaatttcttcaccaattgcatgttttgaatcagatttactataaataagagatactatttagaatacaattataatattaaaaatatttatttaatatataccataacagatgtaatatcatcaggtttaccaccaatataatcttgacctgctaattcagttaatttttgtgagaatgcactcttgaaatttgtatttaaacttaaaacagttgtttgttgaactaaaactttatttaaaccacctaaagtttcagataaattaacctcatcatttgctgtatcattaagatataattcaatatcatcagggaaaatattatcaatcataccatcagttgtgaaaattactatatcacctgattctagcccaaatgaataattatcaggattcatttggttcattcattaaatactttgaacccctctttttggcatcttccaagaatttttcaggtataattgataattgataaggtgcattaaaataataaatttgttcatttgattgtttaacacatttatattttaaagtatctttatctttacggaaaactccaaaccatgaatcacctaaatttagagcatttaaactacctgatttaccatcaattataccaaaacaaatagttgttgaaccaactttcacattaccttcagatttaactaaatcaaatgcatcatttaaaattgttaaaggtttttgatttggattatttaagtataagtaagttattttatttgctaattctctactaattgcacttgaatcaaatccttgttcagaccaaccaccaacaccatctaatacaccaataattataccaatttccgtataagctaaaatataattatcctcaccagttggagattcaaatacattatttgcatttaacagtttaaaattttgtacaaattcaccttcatcataaacaccatcatcatttgatacatttttttgtaatctatcttttggggaataagcaactgatacagtatattgtaaagttgaatcaatgaatcttttagtaaattgttcaccatttttaaaactacgaaatcttctaaatgcttcatcagtcgatgatgaggtgaaattcctaaatgtaattaatgagttaattgaattgaaattaaatttttgtttatcatttattaaattattattatttgattgatatgaaatatttactttagttctatgtttatttctatttgaatggaaattagccctttgtgagaaagtatattttattcttaattttacagcattatgatctgataacaaagttttattaatgatcttttgagatattgaaactattcttgatgaatgtgaatacattgttgttataaatgaatttgatgtgatggacaggttttttttaaatgaagtaatatattatcgggattaattttcttactgaattttaatgttgataagtgtagtatagaaaagaaaaaaaatgtgaatgtgaaaccaaaatatactcagctcaattgtctttattatcaatttatgcaatgaattagagatgatacggtagtgatatacagtacagaaatcaaaagaaaaagcaaataggaatgtcctgtcactttacaatgtgtagcggaagaggtagaaaatattaaattctgaggaatcatgttagatttaaagtggagtaaattaaaattgtaataagatttaaagattatattgtattacagtctatatattatattgcaagtatatatgatacaataactatatcaataaagtgaatatgaatgagtatacgaatatgtgtatgtatgtttattttgtaagaatatgaaaaataaataaataacttaaaataaataaatcaactatattaatcaatcaattaaattaattttctaaaccagcaattgcagattcaatagcttttgcaaaatctaaatctggattttctaaatcaaatgtagttgatgattcaacctttggtggatttaatttcttatattctgccttagcttgtgcaattaagttaagtttcttttgatattctgcttcttccttcttcttagaagcttcactctttaatgaaagatcatgagagaaaccatagaaaacaccagcaactaatgcaccgtatctaaagacctatattataattatagttagtatttattctatatcatttccatcattttctaataagattaaattatgaaaaaaaaaccaaaaccaatgcaatacatacgtttaaagtggaagacatgttgattgttcaatgaaacaggtaaatattgaactctataataagttgtgaaaaccatccaattgggaatccttttcaatttttcatgaatttttcgcttctctgagaggatttcacttcctttgactttctatttgctgttgtgtggatcaattgataaagggtattgcaccttttacacttattgtatggtatcatgtaattgtatatgctgcataaaattgcttacacaacatatactatacaatcatacgagacgttactctagattcagctacctttagtagaaatttctaattatacatacacaatgctacataaccaaaacacttcccaataaggaaatatcattacgtaagactatctctgttcatgaatctgagtttctaactgatcttaagacaaagttcttgatacgatccttctctgcacgaatcttctcttgttcatgagcaaggttgactgcaattttggtattttctggaattgaaagactctttgcttgaatctttttaccggatctagccaaaaatgtaaatttcattgatttattttgtttgttgctaccattattatcatcattatcagcagctgtaaatgtagaaagaccaccaccttcttcttctccaccctttcctaaattataaagaattgattcaggtgtaccaagtttttcactcaatgtacccttctttaattgcattgtagtattattttgtaaactctccttcattattttacggtattccatatctaattcagcttctctaaatgcttcatttctctccttttcactttgtatttcatcatcatcatcatcatcatcaaagtctacatcatcatcagaaacaataacgtgtttgccttctactacttcttcgccctcaccattaccaatgatactatcttgttccttatcattttcttcactactatcgtcatcactatcatcatcatcactatcgctgtcactatcactatcactgtcatcactatcgctatcactaccaactttaagtccaattatcttattaacatcatcatcatcaagatcaccagttaattcgcttatttcatcatcatcatcctcaccatcatcgttatcagcgtcttcagtagcaatattactttcttgtttaccatcattagatccttcttgtgatgtttttgcattgacagcgttcccatcgttttctttaaattcactttgaagttgaattatagcatcttcatatgattctgccctagaaaactccacaccatttggtaattcaaattcattcaaatgtctaaacatatcagccaatttattggaaacatctatacttaatggatgttccttagtaaagatataataattgaaaaatctcataaatttaataaacggacttaattgatgtagaacatgttgtgcataaactcttgataaaatttcactaaccattttaatcctgaaaaaatcatcaaatccatcagcttcacaatatgtatctctacttgggtaattattttcatggccataacaaacaatcttataaagcattggaataaggtaagttcttggaataactttgagattgattagttcaatgaaatatatgacttcagataatctttttcttaatgactgataatcattatattctaatccagttgttatatcttcaattaattgatcaaccacaacagttttcagagatttattacaatttaacgtaacatttctgagaacagccgccagaaatttaatatcaatatagttcatttcactcggatttgaaaataaaatttctatccttttgtaaataatttcattattccaatctgcacatttgataatattagaaattaatgggaaagttttcaaattaagttgcgtttttaccatataattgaggaattgttcttcctttagtaattctaccgtattctgtgatttaaccttaggtggattcaacgataaaaggaaaagtttaactgcatatttatcagtatgcgagaattttttagttttgtataattgttttaataaatcaatcatttcctttgtgtgatctttatattgttcatcatacaataagcattttgaacatccttcaaacattaaggataacaaatcaatattattattcacctcaatatttaaaactaataatctaattttatgaaaaataacatgaataggtatcattttaaacttaatcaactcactgaaaataataatatccttttctgcaacactatcatgacgaatttgaaatctaaaacttttatctaatcgtgtaattaaatcttcgatacatttatcaaaataaacagcattgattttcaagaatctagcgatattcttgaatttagaaacttctcttaattcaatgatatatttacttaatctatttcttgaggctttattacttaacccccattcccaaaaatcaacgactatatcatcgatatctttagcagtttcagcctcacctaatcttaacataatatcagcaattttattacctttaccatcacttgctaaaactttagaattcatattttcaattgcttcctgtgatactaatgattcaattgttggaatatcttcataaaactttttaacatcttcgttttcccaaatttgattgacatttgaatcagttgctgattttgtaaccaatgtgactttagaagattcctctgctgatttattgatttcatatttaggtaaatcaataccaacaattgggcaagcaaattcacaaaatgtattgaactctttcagtatctcttcaatttcttcagcttcaatttccatattagtaacaactttaccaatcttaattgcaattatatttgcagttgatttaattttatgaatagatttataatccttttcagcagttttaacagcatttgtaacatatgatttgaataattttctcaaaaacactgatatactttcctcatatttgggattaagttttgaatcactttcatataacatgaaactaaaccttttcaaaaatgatgtcattataggtaatgttataccagagttaaattcataactcataatttctttcataatcgggattataataggtatatcatctttaccagcaatttttaattttttcaaataaggtggtaactcatcttcaggcatatcattcatatttctgaaaataccatgcaaataaaattccattgccaacttcaatagatttcttaatctaaccattaattctttttcttctttctttacaagtctgtcttttggatgaacaaaactatgcacaaaatacaattcaacgaatggtgtaaaagatgttgtaaaacgttgatgtaatgctgaaacaacttccactgtcgattgaacatcagcatttttgactttagttaatgattcacatagagcagctgaaatttcattaatatatttctctaatgaagttgtttgaattgcatcaataaattgtttttcagtttcctttgtgatacctgatctgatctttttgataaatgcagtatttttcttcaaacttgaatcaagtttaccctttagtttgaaaacattttcctctccattccatgctctagtattaagatcagaaagttcttctcttcttatttcactttcattactaacagacattctatattcctaaaatatctttgccatacacatgtatgtctataatatagttgcctttacacttggaagttataacggggaagttataattggtgtgagctgaagggaaaaaatcagtattaaaaacttgcacagagccaattgcgacttcaacgattaaatttattattaggtaagcgtggctctattaagatgctctataagaacgcttttgtcacatttcgataatatgcaatataatggtatcaatacaaaggcttcttttttccaaactaaaaagttttttccatacacatagaaagagtaaaataatttttgttataaagtttctatacaatttaaaaaatttggttaataattaaattacttcaacaggaaattcaaaggattcagaatgtgattttttggtagtaacggagaatttaattttgtataatcttgcaagcatacatgtttgaaatgatggtactaaagcaaatggattagctgagataaagtctgtgttgaatttaaatggaatttcatcagtgtatctataagaatttgttttttcacaataaacccatttatcagttaaatcaatggttgtgcttgtaaaagtattataaataacaaattcaatatatttggtactagctaacccttttaatgtttcaaacaaagttttagggactcttgaattatacgatttcatcatatcgcatatcttgttgtaatatagaataaacttttcaaatttagttttgatggtttttggactattgagtaaaaatgatttgtcaatattgaatggtaacttatgaattgacgtaaagtctacaccaattaaatctggttttattgtaactgatgttggcaacttagaagatttggtcttgggaagaaattctagattaacatttaaagaaaatatttgattgttgcctaaagaataaattaaattttcaagagatttatttagtagttttggtaaaaagctttgaatctttgttgatctatccattgaaatatgcatattcatagcaccatcaatttttgaaaataaatcttttttgaacacaatagtgttttcagatgaataatcagcacactttaatttttcattagagtaagttggaatttgatcagatgacccagagattgatttggatttaccatttgagctaaagattatttcatcttgttttctaatatctgaaacaccaatctggtttaacatgtttctttcagataaaacttcaattgcttcaatagcttgtttttcatatctttcaatttgattgttggttgtaccgttggtgaaaacataatcttcgggatctgggggtgattttccaaccctaatgtaaaattccctgttcttgataaaaatataatcatattgatgtgtagtgtttttcttatagaaaggtttatatgcttctaaacgtgtaccaataatttgaacattaatataataagagacatattcaccaccaaatgaataatccttaacatgaattggggaaccaggagtgtcaagcctaccataacccaaacttttattgatttcaattgatgctgcagtatttgagaatgaagaaggattaaaaccaaatgaaggaggtgttttcaagtgttcagtcaattgatgttcacaacaatcatctaaaacatagtttggaattttgaatttgaaaaactttttaattggcacacctggatcaagtgttcttttttcaaaaccaacataagttttatccaaagaatcatacaagtggcatgtatcattatcaccatcagcacctagaaagttaaaggaagcttcaagatcataagttgtcataatttttttcttataagttaaattcttattagattgctttacaccgatttcacattccatagatactaaaagcatttcaaaggggatttgtgttttggaattattttcaaaaataacaaatccgtaaaccatatcaccaggtaaatattgttttaatggagatctttgttcaaaaggctttccaagaagtggtatttcttcagttaatttaatagtaacagagaaaggtaaattaattttttgtattttatctaaattgttcaataataaactacttggatcatttaaagtataatcaaaagaatcagcttgggttggagtagtagataacccaattgattctgatgagctttcctcatattcaggaggtccttgaccaacactataaggatcaatcaaagtacggttaaacatatgattatgcatttgaaaggaaggcaaaatatcagttaagtaatctttttcatcaagttttttttcagataaagagatatttttaattgattgactaccagagtcatcaatgcagattaattgttcattgtcattagtatctgccacattgacagagctattggtattaatgtttgaattcattattagtaatagagataggtggaacgcgtaaagattgcctttggaaaagtggtagcaaaataatttttattttgtaataataataaataatctatttgaaaaacagttataagggaactcaaatgcttaaatacctcaatcagagtaattgaaactaagagttaaaagcagatataaagaagatatattagtcacattacaactttcaaataaaaagtttcactttaaaccatataatgtttaaatactaaaattgacaagccttcaaatgcgaataatagatttaagctgaaaagggtaaagctactagaacattctattgatttaactgttgaacaatataaagttaccgagttgatatgtcaatctatccgagagagactacttttcacagaaaagtaccagttatcgggtggaacaagataacaacaataaagcaaaaggtcaacaactgataagaacaataaaaacaggccaatgactcattatataacaagataaaattttgggaagttattaccgacggaataacgtcttttttccccgaaaattatgaagttgttggaatcttattatatctttatttaagttcatcttcatcttagcattactcttatcaatctacatgaaaaaataatgttttatagggaaatcatttacaaattaaaagtgtaaactatgtacaaatattcaatataatatataattttgattatgataatataatatgatataatatactgctaaacggatagatctagcagttatatgtgtggaagtcagtctaattttactaaaactagaagctatccctagagaaaattctacctgctggtagaccatattcttttctaacattttcaacattaagatcccaaacacttctccaagcgtgagcaccaactgcttgtaatttattattttcaacaaattctcttatttggaaattatttatattctcaattttagatgttttttcatttaatttaccatcttgtctaaatatccaaactgcaaacctttgtttacctaaattcttttcaggtgttggtggtaagtaatctacaattgaatattgtggatttgaatctaatttttgtatatcaataattgaatcattgtttgaaagttcaacatcctttaatgcccaatgaagtgtggttgtataactgttattttcaacatctggagtatctggatttacaattaaaattgtatataaatcattctttgattccttaaattctgtgattttgaaaattggtggttttgatgtaacattacttgataaaatcgaacctggttcaacccaagtatcaacattattatgtgggaatttcatatgaacatcaacttcaggttctaaagttggtaaagtatctggaataatcgataaagtttctaatctttgcattgtaatcattttattataactttcccattgtttctttgcataatgtctataaacaggttgtgtaagatcaatagtatttgctgcatataatgaattatatacaacttcaggattgttaatttctgcttcaactaataagtcattaatttcttcaacattttcagatcctttcttctttaaatcttcaattttactataaattttttcactctctttctctaaaatttcatatgctaatggatatattttatctaaatctattggtgaataatattttctctttgatgataacgctttaagtgaaacaggtccatttggtaaatctggtgataatacagctttttgtaattttgcatttttaatagccaatgacttggatctattggtaaaattagaccatatacctcttgaaacactagatgacattgcctttattaatatgaggtattactatatattctactaaagtgataaaaactttgttaccttctaccagtctctctctcccttaagttaacgaaattcgttgaaaaattccaaagaaaaaaaaatacatgttgaaaactggtgcaaaggttttaaatatttccacttttggcaattacgtaatctttaatatcgattttctacttctactgttaatgtattcaaatccgaatgatgatgataataaaaaaacttataacattttcattaaatctaaataaagaagttatatatgcaaatgagtatatctacctgattagatatatgtatgtatttataatgcaaaaatttcaatcaatagtcgttgctagttgacatactatcactgaaattaatttcagaatcaacaagaaatgattgtgaaacatccatattatgtactattgatgtaacagattggttggtattaattggagtattattctctgtaaaatgtgatgatgatacatctgataaaccagaaaaatctaatgtattggtatgttcattttcgaataatattggattgttattacctttcaactgaatttgagaatctgagttattcaagtatttgaaatctgataataatgtactattactagcatcagttgaaaaactgaaattactgttattaaactttgatgtattaccttgatgattaaaattattttgttttttgttgctaggattgattacattatcagccggtgataatgctatatctgatggagtaaacgaatctaaaaatggcatgctaacaaatccatcaaatgataatggtaataccataaaatcaatttgattcattgatcttgatctagttcttttatgacctcttgataaattcaaacttgcattaagactcttttcaatgttcaaattgcttgggtttaaatcaaaatcatcagctattgttggtatattatttgacactggtatctgggatgttgcattcggtaaaaaataatgctttgaatctgattttacagaatcttcgacagaagcattattgaaagatttatttgcaggaaaactgtatgtattttgatgaaccggggttaatgatgccttagattgcaattgtatctcagatttgcttctaagtgaattactgtatgtttgagtagcattgaaatgagggtgattttttttaattgatgatcctaaagttgatacgttcatattgagcctttgaacagtttgtttaacattatttgatgaagaagcagtaggtaacggaattttaaccttattttcagacagcggtgacactgttcttgggggattggtagctgtttgtgctttaactgtattttcttctttacgattgctgttattgacactaaaagtatgtagttgtggtctattatttagtaattttaaatcgccaaagttaaaattggataatgtgtaagaatttccactttgtgtatttgttttaaaatcccatataaaagcgtgtaatggctttttgaaatttttgaaatttagtaaatcatcattaataagtaaagtatgtgatatttttaatttattaaaacgtgtaccatcacaaataccattatgatactcatttatcaaaccagcccataattttgcttgcagaggtaaaataatcttaatagtttgtcttgaatcatcaataaaagaagcatttataggatcacatcttttaattagtaattgatcatcattataaacccttgtaattgatttcagttgaataattgaagtaaaattgccatttttaacagagtttgaattatagttgaggaatttattaaattgtgaaatgtttaaagtaacttcaatatatgaaatcatttgatcatcatccatattgacacttgtagaagagtacaacgatattggaagttcagttattgaaatattaagtgaatgtgatttattgttagtgtcagtgctattagagcctttctttgaagtgatggttgttaaagaatctgaaatcattttaaataaatgtttagatgtattcagtttatctgtgactgcatggtcatttttttctttttcatagttgttaatgttagtaaagttgacaaaagagaccctcttacattttacatcatcatgttcccttttcttatttattaaagtttcaattttcactgcatcaattgttaagttgctgaaaagatttccattactcaaagattcatccaactctttagaagaggtattatttataggtgttgatgatctcactagagagtgattatgaataggttctagtataggattggtgaatgtgttggttgatgatttcggagttgataaggaagctggtatagatgacgatattggtgtattagttgaagctgcatatgatgatgatgttagggatgaaagtttgaatactgatgatgttgtggaagaaaatgaatcagactttggtttctcggacttaggtttaaattgaatttctgattggttaaatatttcaaatcgtttgatatttgaaagtttggtatcattttcattatttgataaagctgtattctttttcgttttgtttgttagtccctgaaaattataatctctacttagcttttctagatcattattgaattctctttgcgtaattttagttttaggtttggccttctctttttccttcgatttttgctttacctttgagttcgttttcatttgtgggttgatatctgtagttttacttgttttagaagaggccatagctattggtactaatgtttgaccatgcagtgcaggatgcgacgataatcccaaaagttcagaatgctcggcaagtaaattaacttcggagttgatgcatgttaaatcatttttgtaagtttttcgtttattataacatttcctacgtttattagattcagctaacagtttattgacttcagtggtatagttatcgttgtttagaaaagatttgacttctggatctagcctatcattcctaatttctgctaaataatcattaaccattttagttttcaaattaaaacccatttcattcaagtaacacactaagtaatcagatcttggttgtacatcagcatcaaagtcagttagaaccacattatattgcctaagaccaatagcaattgcattaagaatttctgccttttgtattggtgcaacatcattggcatttggtgattgtacttgtgattgtgatcttgataaaataggatttggattattaataatcggggaaactatagttataaaagattgattgggtagagttgttatgattggtttgctattgacatctaagattcttgtttccttataatttagttgattttcagtattacttttatcgtttttacatgctttgttgctgccgctgctgcttttaatattttctttattatcagaaagatctaatgatgtgttttccatcctagtattgttaccaaacataactggcgagaatttgaacgaagatgatgaagaagaaggttcatcagcatatgatgacttcgttttcacaaaaaattgatgattcgtaaatgttggacgttgctcgttatctgaaggttggtgcattgaaggagaatccattggaatagtcggagagctggaaaagtcttcaccattttgattgatccattcttgtttatcatgatcatcaagatcatcaaatgtataactatctgtatttttgtctctatggaatggatcatctaacttctgtatattctccctgtcattatttgcaatctcaatatcatgtttttgtttgaggggagatacatccaaaatctgattgaaaagatcgtctgaaattgagatatcgacgtcttttgacggcatgattgctggttgtaagtgaccgttgaatagaatgataaaaaaagatgaatgaaacaaggtaaattttcaacctgaatgaatcccttttagagatatataatttttttaatattgagttttcaaaggtgatatacaataaaaattagtattattattattataatgattcgtagattaccccattattaatcttttgtaatcatcaaactgatctaaatccattactggagttggagtcccttaaacgcgacacgcttactaaattttttgttttatgatgatgtaatactgtcatcccttgctattcttgtgtaccggcccatcgactgcataactcttgacatatcgtttgggcttgttaatgctgcagtagataaaattaaacagtctttccaaattcagacccatttcacatgtcccttttccggttcagtttcacaatgaatactgcgtacaacttcttctgcaatacatgccatcattacttgcaagatatagcagattattgaagaataaaccaattttaacgaactccgttgttgcagccactcttttcgcttcaggagatgtcattgcacaatggatttcacctgatgagatagcatttgacagagttttgagaaatgctttgtatggtggtattatatttggtccaattgcagctagaatgtatccatatttagctaaacatgttcatttcccaagaaaagctaatgtaccagcatcaaattttaaagatacaactgttagagttgtagttgatcaaattgtttgggcgccgtttggtattgcattatacatgtcatgtatgggattaatgcaatctactccaattgatgatattaagaaagggttaaagcaagggtggtggtcaacagttactgccaattggacagtttggccattagtgcaaatggttaattttgcatttgttccagtagaacatcgtgtcattgttgtttctattgttggagtgttttggaatgcttacctttcaatgaaaagtaataaatctggtttataaaggttttatttgacatactttattttatgtacattttttatactttacttgtttctaaaataaaagcttgagttaagtaatttctttttataattctttttatccttcctacttttattaacatttcttttgttatcctcccttctttaatctaagaggaataagcataaaaagtaggaagagtagtaaaagatgatacaaggcaactgagccttcgaaaagaggagacgcgactttttgggaatttgcccttgaatttctgtcgatgatatgataatacagctcacttattattagcactcattttatttacgttattgtgatgtgtgataatatcatgttattgggtgaaatattgattgttttttttaaattaacttcattctagttacatctcgagctcttttcctttgacaatttcatatagtcaacaatgatgaagggattcaagcaacgtttccgctccaaaactggcagcagaaaggataaagatgagtctcctaaaaaggaaaaggacaaggaaagagagaaagataataaagagaaagatagagattctaaggaaaaggaaaaggaaaaagaaaaggaaaaggacagggatagtagagaaaaggaaagagataatattagcaaaaaggaaagcaaaaataaagactttcaaacaaaatcagcaacacttgataccactactgcatctgttaatacctcaaacttcaattacgatcaatcaacccagcaaacttcaaccttatcaacttctaatactacaactatttcaattaatgattctacaatggataaggctaacattgatgtcccacaaaatgaaattgattttctcaaatttcatacttcacacacctccccatttgataaagtccccaaggatgatttagagttaaaagttaaaactccacaacgtcattcatcttcaaggtttgaaccatccatctacaatcaaccatttgaaaaatcaccaccatttgaagaagttgatcctcaattttatattgatttatttattcaaaaggttgatcaatgtaaaataatgtttgatttctgtgacccatcttcagatattcaaggtaaagaatttaaaagattaacgttacatgaattaactgttttcataagtacaaatagaattaatttcactgatgaaatgtataaacatgtcattgaaatgtttaaaattaatatttttagggcaattccaccgcctgttaacccaattggtgatatatatgaccctgacgaggatgaacctgtgtatgaattgagctggtcccatatgcaattggtttacgaattcttccttagatttattgaatctccagattttaataatacaattgctaagcctttcattgatcataaatttattctcacacttttaaatttatttgattctgaagataatagagaaagagattgtttgaaaactactttacatagaatttacggtaagtttttgagtttgagatcatttattagaaaatcaatcaataatatattcttaacttttgtttatgaaacaaatcatttcaatggtatttctgagttattagaaattttagggtcaatcatcaatggttttgcattaccattaaaggaagagcataaaatatttttaatcagagttttaataccattacataaagctagaggtttatccctttatcatccacaattggcatactgtattctacaatttttagaaaaagattcaagtttaaccgaagaagttattatgggccttttaagatactggccaaaaataaattcaccaaaggaattgatgtttttgaatgaaattgaggatatctttgagattatcgatccacttgaatttcaaaaaattgaaatcccattatttgcacaattatcgaaatgtatttcatcaccacattttcaagtttctgaaaaagtattatgtttctttaacaatgaatattttgtctcattagtgacagaaaatgctgagaatatcttaccaattattttcccatcaatgtatgaacttgcacaaccagaattgaatatcttagaaaatgacaacaacaacagtaataccaacaataatagttccaataattcaaacaatacttcaaatacaactaatgatttagatatagattttgatgttgattttgatgaaccaaataattggaatagaacgatatcaaccatttcatatagtgctttgaagatttttatggagactaatcctattgtatacgaccgttgctttgtcctatatgaacaacaattgaaggaagataatgaacgtaaacatttgagagaagaacattggaaaaagttggaagaatatgttaaaaatttaaaagagggtaaggttgaatcaaatgtagaaattaaatgattcccgttttacaagaaagtaccatgtttctttatttttttataaattggtgatatatagtctaaacatttattgaaaaagatagattttttttatgttgtactcttatattctctaagaataacaggaacagaagatggtggtaatgcaccaaattcagtgataattttttgaatatattcaggtggtgttaaatcgtataatacattaagaatattaagacttggatattgtttccaattactcaagtcattttcatcattcagacggttagcattatttgctgcattatttttagtattattattattattattgctgttgttcttattcttaccgttattagctttgttattcttttcattttctttagcttcacgttcttctaatttagtaatatactgttgtaaattaaaaccttttttattgaatggtttagtgtttatcaaatcgtcagagtctcctaattcatttaaagtcacagagtctaattgaactttatcactgaatttcaaactctcgcaacaaaccagtacaggtatggacttatttcttgatgacatagcaactaatgcactaccaactcttgaatagagacgaccattagataacattgagtgagcacctaagaaacaaaaatcaatatttgatttttctaataccgaacttaatgagttaattagattgtagtgtaatttaatgttgtcgtatttagataatttctttgctaattttttaccttcaaataacggtttactatcaataatgtaaatttcaaactttttgttttgttcgactgcacaaaattcaaacaattcacttaagacattagagtgcccatatgttaaaatctttgagttattatggatgtgagtttgcgcatattcaatgataactttatctgctacttcaattttttccattataaattgttcaatttcttctgttaaaatttttttacaatcctcttcagttgtattgattggaattattgaaatcttttgtttcaaccatctaattgcattacccatagaaatacttaaaggtctaccagttttcaagtattcaatttgatgacttaaatgaccagttaaatgtctttgtaaactgataccttctggtgttttatatgagttgataacatctatgaaagctctcatcatttccttacatctactacttgatcctacaattttataagtggaaattttcaatgtaagggataaaatacttggatgaacaattgatgcaatcttggcagttgatgaaattctctcttcctttgtttctaaatgtccaaacattgatggtgttcttaaatttggattatgaattttagcattattaagttcttttttaatatgtgatacagttttatgacctttatccttatttttattgttttctcgtaaagcattctcctttaaatgtgctggtgttccagatgatggtgcattagctgttggggtagttgaattgtcaccttcagcaccacctgcagccttagcagctgctctcttagctgccttttcacgtttctttaattcttttaactccttatttgataatttcttttcatctaaaacagcggcagcgccagtaagttgtttctccactggcttttctaccttatcaacaggtttatcggacattagagagttgttattctaatgaaatgtatcaatgactgatgcacttgacagtacgatctttcaatatttagagaaattttccagtttaaatcaatttcgcaatttgattttttttctcggaaaattgcaattctcaagattttttttttgattgacatcgtcgacagtgaaaaatttttgttataacactttaaggaagtgtattgaactgtttctaagtgacttttatatatcaaacagcaagcaaatacacagttaaaatatgagtgacgaagctgaaaaaaatgttgagatgtggaaagtcaagaagttgattaagtcacttcaaaatgctcgtggtaatggtacttccatgatttcacttgttattccaccaaagggtcaaatttcaatcattcaaaagatgttgactgatgaatatggtactgcttcaaatattaagtccagagttaatagattatctgttttatctgcaatcacatccacacaacaaaaattaaagttatattctaatgttccaaagaatggtttagttgtttattgtggtgaagttttaactgatgaaggtaaagaaaagaaattaactattgcatttgaaccatttaaaccaattaatacttctctttatttatgtgataataaattccacgttgaagccttatctgaattgttagaatcagatgatagatttggttttattgttatggatggtaatggtgctttatttggtgcattatccggtaatactagagaaatcttacataaattcacagttgatttaccaaagaagcatggtagaggtggtcaatctgcgttacgtttctccagattgagagatgaaaaaagacataattatgttagaaaagttgctgaagttgcagttcaaaattttattacaaacgataaagttaatgtcaaaggtttaattttagctggttctgcagattttaagactgaattatctaaatctgaaatgtttgatttaagattacaacaaaagatcattaaaattgttgatatttcatatggtggtgaaaatggtttcaatcaagctattgaattatctgctgaaactttatcaaatgtcaaattcattcaagaaaagaaattaattacacaatattttgatgaaatttcaattgattccggtaaattctgttatggtattgatgatacccttaaagctttagatttaggtgcttgtgaaattatcattgtttgggaaggtttagaagaagtaagatacacattaaagaatactgaaggttccgaagttattaagatagttaaaccaggaactccaaaggaagattatttaattgacaaggatggctcagaattagaaatcgtatctgatcaaccattcttagaatggcttgctgaaaattataaaaactatggtgcaactgttgaatttgtcactgatagatcatctgaaggtgctcaattttgtaaaggttttggtggtatcggtgctttattaagatataaggttaattttgaacaattaatgtccgacgatgatgatgatgaatatttctccgattagagagtctgatgattcatgttttatataatatactatatgtttcatttttctattttacttacttagccttctttactgttttttttttcttctgtcatattaataatatactactcttttatatatgctttcacttctcagtttcattaagaatactggagtttataccaggttaactaagttattaacacatattactataaaactttatacaaaattatttcttagattttttatgattctttaaaacagttaatgcatcctgttgaagatatcccataacgctattacttccttcattagccagtagaagatgtgcgatattgtttaatccaccagcaatataagatcttctacctgattttctgataggtttttttaaagaatctcttaattgtgcctttaagactttaatattatttttatctaattgcttaccttcctttcttttacgatctctcttgagaaaatcatcttcaaaatcatctatattatcaacacctaattcatcagctgctttttcaatccaacttttttccttttggatagactgtgatgcaacttcagcttgggcaattttagcagataaatctaatctttcctttaactggtctaaaatatcactatcaataataattggtttgagatctgcaacattatctgtcttagaaataacacttcttaattttcttaaagggccagaagcttcttgaggagagcatagaacaacagaaacaccttctttacctgcacgggcagttctaccggacctatgaacatacgtatctgctgttcttggtaaatgataatgaacaacgtgttgaattccactaatatctaaaccacgagctgcaacatcagatgcaatcaaaactgatgatgtcttttgtgcctttgctgtttctgagtttttggtgaatctttctaacgctcttaaacgttgtttttgaatcatagatgaatgtattgaaacagttggaatacctaaattacttaacattggtgctaaacgcttaacggaatcaattgagttagtaaagactaaagttgtaccggggaacattgaaacaaaatagtaaagcatcaagtcacgttccattggagcacatggaattatagcttcagtaattttgtttgcaacaacttcggtagggttaacatcgacatattcaggtttactacggaaacgtaactttttacctaatatttccaaaacttctctgatttctgcatcaccttcatcttcatttttacgtttcttagcatgttgaggttttttatcacttgccaatttcccaaataaatcttttgaaaaggttgctgaaaagattaatgattgccattttctttcaaattgatgaagattttttggtctataattatttaaaatttctagaattttcttcatttcttcaaaatgaccatcttgtaacattctatcagcttcatctaatacaagtatatcaatagatgcaattttttttgccaaactagtagatttctcaagaagttccaaacaacgacctggtgtagcaactaaaactcttgggccgtatgataataaacgttcttgcttttgaatagataaaccaccagttagtgaagtgacagttttgtcactgaaaggtgaaaatttgaataattcacgtaaacttttcataacctgattagcaagttcacgagttggtgtaaaaataagagcagttgggtgttgacggatttcttctggcaagtttttactctttgcttcttcagctaatgctttttcaagaattggaataccatatgctaacgttttaccagaaccagtaatagcctttccgataacatctttatctgcaatagctaagggtattgaagttttttgaatttcggtaggttctttaaatccaagtttttgtaatccatttaatgtacatgtggaaagagataattcggtccattctggtaaatcaatttcatcagttggaatattgatatctgatacttgtgcaaatgtattttccttaagatcatcttcgtttgatgaagcttttgctttagcttttgttttttcagttttagaaactggagtttctgtaactggtaaatttggaatattaagttcattatcttcatcctttgatgcaataaatgtggacactttagtttctttcttctttttcttgatttcagcttctttttgttcattttcaacattatcttctgcgtccttcttatctacatcttcatcattttctttagattcttcggttttttcgtcttctttgtcgttttcatctacatcttcatctatttcttcatcaccatcacctacttcttcatcactggtatcattgagcgcttctttatcttcttctttgatatcttcaggatcgatttcaaattgaccactaggaattgtattttctctcacttgtgcatctttttctgagattttattagacttatcctttgttaaaaattcaattttaccattaacaattttaacatcaacattatcaatttcttctaaaccataaaaaccttcaaaatcatccaatgtatcaggtatttcaacaggtttccaattaagttcatttgctgaaactttcaaaatatttttacttaaagttgaagttgaacttgcttttcgctttataagttgttttttcattggttggtcagcagctttagctttagatgctcttttccttttaagaattttttcttttaatgctaatggtaccattttctaattgactgttcaccaaaagccagacaattaaggaaataaattcacaatcatgaaaaaaaaaagttttccaataaaataatttttttataacatgcacatcaaaatttgagaatttttttttatcaacggttttaaactccagaaacagaaggatttgggaacaaacatgacgaaaaaaccacaaaagaagaaaagttcattgatatctaaaagaacagtacctataactgggaataaagaattacataatgcaccaaaatcattaaaaccattgagagcaagacaattaattcgtagatttcatgttttactcaaatacaagagttcaatattaacgagaatacgaaaattagtgaaatggtctgatgaaaaagatgggaatataaatgataattatatgacaataatcaataaaaagaaacaatatggcaaaatttatcaagatgaatgggacaaaacatggaatggattaaagatcaataaaaccccacaatctgtcattgatcctgatactaatgataggataagtaatgatacaaccgttgaagacatgattagaattttgggaaagattgactcggaaattaagaaaagaggaggtttagaaacatatcaaacagccagtacattaggtcaagatggtaaaagaggtggagattcaagtaaaatactagtgaaatggattaaagaacttggtaatgagataaatacagatacagcattagaaattgggtgtttatcatcaaagaatgaaatttcgacatctaaaatttttaaatctataactagaattgatttacacagtcaagaacctaatataattgaagaacaagatttcctcaagaggccacttccacaaatagatgaagagaagtttgattgtataagttgttcattggttgtgaattttgtcccaagtgcagaacaaaggggtgaaatgttatgtcgtatgtgtgatttcttgaatgaacctagatatgataaaaacagtttccttttctttgttattccattaccatgtgttgaaaactctagatactgtaacttagagacaatggatttaatatttagtaaattaggatttgaaaagatgaaatatcatcaaacgcataaacttgcgtactggttattgaaatggaaaggttcaaaatttgttgattttaaattcacttgtcataagaaagagttaagaacaggtaaagatcgtaataatttctgtataataatcaaataataagggaaggttatttaatttttggatattatttccataaaacacatatcactaaacgatgaagtccattggttatctaaaatatttccttttgttatgtttgtagcttttacgtcgttaaaataagctgattcgaaatcataattgatgataataggtttgtgttttattgaatttgttttctttctatttttctttttagttggtaactgaaatccatcatctactggtttttgttcggctgtggtatctgatttggtttctgatttctttagtataagttgagctagtcttgcacaatttaaagatttttcaaagaatttggcttctggttgtttataataatacaccattaaatcattagagagtatatattttggtttatattgattgatcaactcttcaaatgcaccaatggggaaatgaggcatgtaaaacaatgtttttccaatttccttagtttcaaaagtttcctcaactttaaagttaggtatagtttctaaataagtggtttcctcctttgtaaatataggatcccataaacttatattaaaattttcattttccttaaataaatgtttaacaaggatgttcaataatgataattgatacatagcatttgaggaatcagatattggacctaaacctaaacaacgaattgtagtgaaagaagtagatttatcaagtaacactttgtcaatagcagttttaatttgattcacaacatcagaatctttcaagattgtagttcgttcatctaaagtcttagttaatttgtcctgtgtcgtcattggtgttaaaatatccactttgaagatcactttgaaaacttcactacaatagaacttctgaaaaatttatttttttttggtgatctccgggaccatgtaatttttcccacaaagtttttattttgctaccagggttaaaggctcagctttttgctataaatttcttcatttgattattatattcatttttacataaagtcaaggatactttgcaatatgtcactgagaatgagattgagtatcaaaagataattatcttcaataaaaaactgccaaatgaattgttaaaaattgatgattttgatttaagtaataatgctgttttaaaaaaatgctttttcaatgtttttgacagttatcaaaaggatgaatttatgagtacaaacaaaatttggacaagtgcaaaggtactcttaaaatgtgtgcttgatattattagaagggagtttgagaggagaggtttaaaatatagacctatttatgataactttttcccaaggtttaaacgaaagattgtttgccagcattatttctccatcagataatgatattacagagttacgtgattattttttagttaaattagatgatgaaaagattgataaaaatgatcgataaaaatgatgacaccaactacagtaaaagaaggagaattaaatagttgagccacccacttatattattattatcccacattagctaatcaagtgaaaatcaatgaaaaaaagtcgcaacatttcatttcggaatttggcaattacagcgacattttccgattttcatattatcaaacataattatgtgattggctgttatagattttgtttaaatgacagtggttataaggttgatatattgatatctacagacatatgagaaatgatttgtattataagcgtcttgaataatacattcaattggctgtatactaaaataaccgacatataactaccaatataaagagaaataccttcaagcaaactctaccatgaagtgaaaaaaaattggaaaatagtgaaaattacccttttcagtgcgatttcccccgttttttgacaaattatttttcaacgattccagtaagagcatattattatagtcgattggtatattttagtagtaagaaactttttacttctttttctttcttttacttttccttgtttcttttctctttatccttcattctctctattccttcttattagttacaaattagcaagattaatttgtaaatattaagatacggtcaatatttaactcttgtacataataataacatcttcaatatttcatctcatttcacttcatttaatatattgacattctaacttcatttacacaattactatgtctcatatagtttatatacccaaggtttttaaccatgattccaacttacctattccaaaagtttcatttgaaaataatactgtcaaaataggttctagaaaatcactgttagcagttcgtcaatctgaaattgtatctgaaacaattacaaaactttatcctgaattatcaactacaattactaaagtttcaactttaggtgatcaagttcaaaatagacctttatattcatttggtggtaaagctttatggacaaaggaattagaaattttattactcgaaaatgtcggagaattcgaaaaaattgaccttatagctcattcacttaaagatatgccaactgttttacctgatgaattcgaattaggttgtatcattaatagagaaggtatgtactattaatatttcaatgatcacttgttttttttattttcattttcattttcattttcaacactgtttgttttgtttaaatgatgatttaaacatttttttagacgttagactactgaacttcatagatgaaaacgtgttattaactgattattcaaaaaaaacagtttgaaaatgaaattgttttataactttacttttttttcttttgaaaaaaacaaaatactaacagcaacctattattattatttttttatagatccaagagatgccttagttatgaaagcaaattcaaaatataaaacacttgcagatttacctccaggtagtattgttggtacatcatcagtacgtcgatcagcacaaattcatagaaattatccacatttaattttcaaatcagtacgaggtaatatacatacaagattaaataaattagatgatccaaattctgtatttgaatgtatcatccttgcagctgcaggcttaattcgttgtaatttaggtgacagaattactaaatatcttgattgtgatgaaatgtatcatgcagttggtcaaggtgcaattggtgttgaaataaagaaaaacaatgaaacaatgcgtctattatgtagtgttattggatgtcgtgaaactacttggaaatgtattgctgaacgtagtttactaagaactttagaaggtggttgttcagttcctgttggagtttggacaactttaaataatgatattttacaattaaaggcaattgttttaagtgttgatggtagtgaaagtgttgaagatgtacttgaaaagaaaataacttgtgataaaaatgcctttgatttaggtattgaattagctgataaattaattgcaaaaggtgcaaagaaaattttagataaaattaattttaataaaattcaagaaattaaaaatgctggtctgactgcttctgaaactgcaacacctgaacctggtttatagtaatgattacaataatattggtattccaatctttttttttactgcttttaaagaaataatattttatacaatcctcacaaatctctatatgtactctagtatttaacaaaataatttataaatcaattatgaacgaatgaaactttaaccttttggaaattcaattacatattccattaatctttcttgaccaaatactaaaccaaattgcgcttattataccaaacataccaataaacaaaaataagttaaccaaataaggatcttttgcccaataacttaataattcacctaaaacactacttaaagcaactgatgataaaaataatgctaatataccaccacgtaaataaattggtgataattcataagctaactcataacatgtagttgctgcaaaacattcaccaattgcctgtaatgcaaacattaataaataacaaatccatataattaatgaaacttcagattgtgtttcacaatttgatacattatctattgaacattttgaattggaatatacactatgttgaacaattgcaccaaataatgtaccaattgatgtaatggtaaatcctattattattttagttcttggtttaggcaatgaattcaatttcattaattttgggtatataaaatttgaaagtaatggaatcagaataataattgtaattggattaattgcttgataaatatcatttggtaaatttaatggacttgacattgtagctgcaagtgaaatttgaactgatattaatgatgaatcatttaaataaaatggaatgaaaaataagaataatataacacaattgaaaaaattatcaatatcatccttagtgacaacaatatctgcaaatgtagtatctaatggtataggagtttgaaaaatatgatttttcaaatgattgtaaaaaatagtataaacattaccatttgttgtaatattcttgtgatgatcatgatgtaatattcttggttttaaataattaagtaaaattggtaatgttgcaaataataatgcagttgataaataaactacccaaaacccaaaaaatctttctataaatgaaccaaataatgataatgtacacccccaattaataaaactataaaatgacatgctaagcttctctaatgttgctttatggtcaatttttaatttgctaccatttgataaatttttaaaatttggtttagattgcttatgttcatattgatctaataataatggtaggatatttgatttaataaatccagctgaaatagctataagtgcaactgaaagtaagatgataatatatgaaacataaggtaattgcataacaaaaggaattgatgcaataactaatgtaaaatgaccaattattccaataattgtaccaatataaactgatttaaatttacctaaataagtatcggcaatataaccacttattattggagatatatttgcaaagaaagttaaaaattgcattgtaaaagaagcaaatgataaacctaaatttagagcaccgggagtttcatttgatgtaattggatttatctttattgcaccagttattgaatttgttggaaatttcctttgaatcatgtttgttaaacaacctgatatcatatagtatgagaatctttcactaaattctactaaacatattaaatatgaaattttaggtattgaaccagttgttgtgggtatattttcatcatcttgggaaattatttgaaattcatcagttgaatcattaatgggtattattgatagttctatattatcttttgacattgtatattgagtgctataaataagattattacattttcataaaagaagtatcaataccaaacatgcttcaacttcagtaagttcttatcttgacatcgattgatggtatacaaagtttgcaccgccttgtttaaaaagattacctttgagtttaccatagagaaaaattattctcaccatactataacggacgacatgaataattctactgtgttatattaataaagtattggtatatattttagtagagtaaatatattacaagacaaatacaagtataagtaacataaaacaatatggatgatgcagaattacaagcaatacgtgcagctagaatgcaagaaatgcaaagaaatgctcaaggaggaagtacaggtggtatgaatggatcaacaagtggtagtaatggtactagttctagtactagtaataataatgtaaatgatgcaattatgacacgtatattagaacatgatgctaaggaaagattaaatagagttcgaatggttaaacctgaacgtgttatgggagttgaaaattatcttattagattatatcaaagtgggggtattagaggtaaagtaagtgaagaggatattgttgaaatacttgaaaaaattgcagctgaagagagaagaaatacaagtacaaagattaaatttgagagacgtgattacaatgagagtaatattgttaaaggtgtgaataaaggtggtttatctaataatgatgaagatgctgatgaagatgatgatttctttgatgaataatagtattagattcagtaatcaatttgtaaatatattaaataacccttaaagtattattataataataataataataatagtctacttaaattagtaactatctacaacaccttcctctttgggaaactcaagcggtagcgtaataaaattagcttacaccttcccatttgggaaggggccgcctatttcattggcgagataagcttaatttttcaatttttatacgtcaaactgttaattgatatccattattttaattttttcttatcaatctgtaaataatatttcactttttcactttttcacttttttcacaatttcacaattttactatttaaagagatggtattcttaattttgtaaattagattctattaggtcttttatttttttatttatttaattctcttctccctttattaaccaatcaacagattaaactatacacacataatggctattcatccgttcgatcaaattactgatgatgaattaagaatcatcgtcaaacttgttaaagattcttatccaaatgataaacctttatttgctcaagttgatagattagatcctccaaagaaggcaatgattcaatatttagatgctgaaaaacaaggtgttgctcctccagttattccaagaagaggttatgcttatttctatattggtgaagctttccataaagttttagttaatatgacttttaaacatattatttgtgatgaaactttacctgatggtgtcattggtccaatggttgttgatgatgttgctttatttgaagaattatctgttaatcatccaatttgtaaagctgaaattgaaaaattatgtttacctgataatattcatgtcgtctgtgatccttggatttatggtactgatgatccaaatgaaaaaaggattattaattcaatgttatatgtatttagcaaataaaaatcattctgaatcaaaccattattctttacctttaaaattctctccagttttcaatggtattactaaagaatttgttagaattgattatttaccttcaggtgctgatgaatttgttgttaatgaaactactaaatgggactgaattcccattagttgaatatcatccagatttaacaggtattactaaagttagagaagttaaacctttaattatttctcaaccagaaggtgtctcatttactgttgataaacataaaattgaatggcaagattggactttctatgttgttccaaatgcaagagaaggtgcagttatttatgatattcattttaagggtagatcagttatttatagattatcaatgtctgaaatgactgttccttatggtgatccaagaggtccattccatagaaagcaagcttttgatttaggtgactgtggttttggtgttaatggtaatgttcttggtttaggttgtgaatgtttaggtgttattaaatatttagataatagaagagttacagcaactggtgaagttgaagttattccaaatactgtttgtttacatgaacaagatgctggtatcttatataaacatgttaactatagaactggtcataaagttgttgcaagaagaagagaatttgttgttcaaattattgcaactgttgcaaattatgaatatgctgttcaatatatctttgatcaagttggagaaattaaaatttctgttagagcaactggtattttatcaactatgccaattgatagagatgtcgatgttaattatggtactttagttggtccaagagttatggctgcttatcatcaacatttattatcatttagaattgatcctgcaattgatggtcataataatactgttgtttatgatgatgtcttaagaatggaagaaaatactaaattaaatccttataatgttggtttctacactgaaagacattatgttgaaaaatcaggttttattgaacaatcaccattcactaatagagcttataaaattattaatgaaaatgttattaatccaacttctaaaaaacctgttggttataaagttgttatgcctgcaagacaaatgattatggcatctccagaatcttttaatacaaagagagctaaatttgcaactgaacaaatttgggttactaaatatgaagatgatagattatatgcagcaggtgaatttactaatcaatcccatgatgatactggtttagctcaatgggctgatggtactgaaaatgttagaaatactgataatattgtttggtgtactttaggtttcactcatgttccaaaacctgaagatttccctgttatgcctgttgaaatgcatgaaattggtattactccattcggtttctttgaaaagaatccagctttagatcttccacaagcatctaatgctactaataaatcagttcttttcgaagaaaatgaaaaatctaaattaagtactactcaatccagttgttgtaagaaaccatcattataattgatttatcaatgatggaccccttttgtattttataatcaatcatttagtttttatttttttatatcattcctataaatattaaccataattaattcttgttattaatcaataactctatttaacacatagaaatgaaagctatcacaaattcagtcggttctgtagaagatttacccacgggaatctcagtttgttacgggcagcttaattttttttgaccctcactaaaaaaacgtcatgaaatttccgttgtttacttctttatcaatatcttatagctgtgatattagttacacagtgaacattaacttaaagcaaacgatcaaggatgatcatactagttgacaatgtcatcaaaatgtatgatgatccgatcactttatattttgactatatgatgtatgtatcaaatagaatacgaactttcgaaatattatcaacaagtgataaatcaattcaagaatatttaacatcattaaaagttaatggagattatgttttaggtaaatttggacctaaaactttccgatatattgtttgggacggtaaaagatatggccctgcattttctgcgaataatgaaaagatatttagaaataatcgatgtacgaatttatcaaaatctgaaaatggtggtaaaccttcggcttcatagatctatgccagatttgaggaataataatgtaaatagtggtaataatataagtacacgaagtgaaacgtttcatattgtgcccatttttaattcaactgggattgagagaagtaagtttgttaagttatggagtgttgttaaagaagctcaaaatcattttaaattacctcatgaaataggcattgatccaatcaaagatctggttaggatattaaaatctgcaattaaacattttccctcgtcagaaataccatgttataacaataataacgattttggttgggttttgaattatttccttctcagtgaagatcaagcaaataatattatggttttatttgaaaaactaaaagaagataataaagcatttccgattgtatctgtttctgaattaattgcagatttacaaatgacagtctccactatcaaatgttcaagatttttaaaagattcaataccaataagtcaattttctcgttattgtattttgtttaaacataatatatttaattcagtacctggatcccgtaaagatttagttttattttggtcaaaggcatggaaagaatggatagaaacatcagatgatgagaagaagatgaaaatgttaggatctgttagtatacatagaaattgggcagatgacgaagaaatgaaattattcattgaatcaagtgatggtagtgaggaagaaattgattggtttggtgatgaatcatttaataggtcaatgattagtcctggacatgatagtggacttgaattgatcaaggaatctgaatctgaacatacatttactaatgaagagaatgatgaaaattatgaaagtttattaatgaatgataatgtaatgaagaattttagtcaaagtacgatcaattgtgaatctgatattctgatagaaaatgatgatgttgtagaatcaattgtactatctgaagaagatcatgtaattaaaaattaccaagaaattgctaatgattttagtgataagaacagagaggctgattttgtaccaaatgaagtattggatgataatgaaatgggtcaatctatggataacgacataatgtcatacgtatctgaagactcagaaactgtaatatcggaaactcttgaaacaaagaaaaatgaacaaaataatgataatattaatgacaattataatgacaataacgaaaataaagaaaacaaagaaagtgagaatgataatgaacgtacaattgattcatctaaacttgcggtagaaataaaagaagatagtttcataaacccaaagctagatagtggaattacctcaatatcacatgattcagccatcttaaatgatgaaaatacggtggtcaatgatgggactatgattgctgaaaacaataatgatgatatagatgataatgctggaaaggttactattacaaataatgacaagaataacaataaagagataaatgacgaagctgagaatatctccttgattgatttacatattgataatgagattttgaaaaaacctgggactttaaccgctttattagatgaatcatcttcaccatcttcgccatcttcttttggtaatttttccgaatatgatagtgaaagtttaactaattcacctagattgactacaattttaaccagagaagatacaattcctgaaaaaatcgatatgtttgaaaaactgagtggtaatgtaccaaaacatcataaggttttacatcatcttctctctaatgatgagttttccaagaattcattgaatgattcagagagagattcgggtatatctaaaaagaatcttaaacactttgttaaaaggacagatagtggagttgtattagaattgaaggaattaattgagaataaacctgaaataattcaattgaaaagtgtcaaactagcaaaggatgttgctaaactagaggtatcaaagagttttaagaaaggtagatcgattagtgagatattttcggcacttttagatgataatatgaaagatttgagtatttctgcagaatataagaataaaattgttagaccacaagatttatataacagactcaaagttgaatctgataaaaaatgggaacaattatctagaaagacaaaggataaatattatggagcatttttgagaaaatatgatgaagcaataaataaacctgaactttcaaatattgatataggagatattttagagattgttaaaatttgtattgattttggagatattcaacatcgtattgtacaatatgccattaatattgttgaaaatcaaaatggtggtgatgatagtgatctaagtgatatttcaagtattaaaagttttaatggggtaagtagtaatagcatgagtcgtggtaatagtttaaatagtttacggcaaaaaatgagaggttctagtccataggagagaagaggaatggaaagaaccctaaaagatagatgtatatagaatagagaatagagaatagaataataaatttatgtgtataatatagctgtataattgattagatcaaactagataattagaatcaactcaactaactaagaatcctatgaaacattcatctaatattctttcaaaattaacccaacgatgatatttcataaaaatcgcagttgcatcctttcctgcatgtttaagtaaaatatctacaccacctggatgataattaagataagaagttatattaaaaattttccctccaagggacatccaacaatcatcaattttattatgttttgctaattcgattttatctatacgaattggataagatgaaggatcaatatttttaacattattagcatgtttatatcgttcccaatgaagggctgaatgatttggtgataaacgtactttatcccttttcctattacttgaaaccacttgttgagaatcgggtaaggggaaagtttgagagggttcagtgaatgaaacccttatattaggtgggaccctggacattatactattgtttaatttattgttttaattgtgtgatatataactttaaattaaattagatggtgtagaccgtgtctatgatatgatatagtttaatatatcgtatctagtacagttgtacgttgcagttatgcagtatattattggatattaaataatgaaaaattactcaataattgctgattttattgatttgtaggcggtggttttactatagtacgtcatataaagaaaaactcaaatatttttttcccctaaatataatgcttttaatacccagtgatttccatttattttatctcgtttcttgtgatttccttagtttatttggtttcttttagaacaggcattctgctgaatcttttgacaggtttgtaggtgggaaaatcgagcttttacatttttttaaagttgatttttggttatattatatgcaaaaaggtggaaacgcttaccctatgtatgtccaatcaggtggaacagtcgattctcatagatcaagtggtgatgaaacagatgatgagaatggtagtgagtctgatgtgattgatggtcccttgctttgtgttggtaatacaagtaatcatgaaaatattgaaagaaagatgaacaatgataataaagataacttatctcattccgatgttaataattatttttcacctataaagaagaaatttccactacttgataatgtgaacttccatgatgtcggtgttaatgttggtgtcggagttggggttgatctgaatttggatattgataaggctatctcagaaactttccaagaatacaatagtgttgatggttttgagtcttcaaagtttgatgagacccagaaacatactattgactctagtctcagttctccggttgtcatcgaacctatgagacactctttttcatctacatcatcgttaacaaatcaacctaaggtagtattagctagtcaagctaaagaaacaaatgaatctagagattcctcgtttacaaatgatggaaacgttttgaagagaacttgtcaattttgtggtaaaacttttcaacatgcaggttctcttggaagacatttggatacacaaaaaggtaaagcacaacatcctgctgatgatgttgaaagaattcgttctggtgttgctcgtagaggtgatcctgaggcaatccgtattaggaaacaagaacgtgctagggaatataatagacgtgaatatgttaaggagaaaaatagacaaagacgtaagtttaccagtcgtattagtcgtgttagagagagctatcaattaagattctgcagaaaattgggaaacccattattaactgaaaatccaacatttgctgattccatcgttttctttttaccgccatttttatggccagatgatgaaatacctgatgaaacaacacagaaggttgcctataattggatctttgctattgataatgacttacaaacaactgcagagaatgttgataaatctagtaaaactaacgaacaaatgagagaaaagttgaaacttctcaataatattgaatcggaagctttccaaaaactacaatcaggtcaacttttagcagaatggctgaatttaaatgttgacgttagggctgatctctggaagaaagcacaaagacgtgcactttgctctgttttaggtgaacatacagtttttgattttgctgcacgtgacagatggataaaacatttaatggaagttaaaaaagctgaagttgctgcacgtccaagtggtgatgatgaatattccaatgacagtgaagatcaaatgcatcttctaggtggttttgatagtttaatggatatggcaggtattgcagagatggctgaaatggatcttaatgatcttggtgacccgtcgctaggtggcggtgaagatttgaaattttgattttccactatttatgtattatagtctttccgtaatctttgataaactttcagtttcttgaatgaatttattaatgtttaaactgctttttataaaagtataattgatttcagtcaaaaactgcgtaatatgattgtatctggcacattggtagaaatttctactagtttagaatgcgtccgtttgtcaattgatactttttcatctttatttgatgatttttcaaatcatcaattgaatcatgttttagataagtttgttgtgataagtgcaccaaattccaacatattagcatcaccaactgtatttcccgtgataattgacaataaattagataaagatattcaaattcaaagtatgcgtctatacacccgttacaataatgatttcactgtcacctcgatcagtattgagcctattgataaactaccatatcttgcttcatttacattggcttgtccatctgaagtatacactttgttggaaaataagtctagagatcaattacatcaatatattatgagtgaatgtgaatctgcaattccaattatacgattaggttatatctctcatacgttaaattcaaaagtgatattttgtgaacctcatgatcaagggttcattaatgaatcaactaatatcacaattgttgataatgattctgtctcaaaagaagtctttgttcaagaaaattcggataacggtttaaaattcaatggaacgattaaatcaaaatcaatgattcagtatgacaaattatttccacttgattctgatacattacaaaaatatacacattattctttatacaccaattcatctaattttgctgatgatgatgactcacattttatatgtgctagattatcggagtttgagaaacttgactgctattctggtgattttgtgaacttatacttatcaactactcagaaggaaccatatttagttagaatattcccatttgttgaaccatgtacatatgtggagaatgcaatttacatctctccaagattattgttatccttgtcctatccatctactgtttttttgaagcattgtgatcttgtcagtgatacatctgtcgtcaatcctgcgactataaaatttaacaagtttattccactggctagggagttaacgatatcaagagtatcaacacctgtaactaatgataaaatattacaatattcctttttatcaaatttaaaatcatattttgaatcatccaatagaattgtttataaagaacaaatgattccgatacctattgatactactttagctaaagcattacataccacttatgactccaagggttggtatcctgaaattttaccatctggtaaacatgattcaattgcatggttcataattactgatggagtatttgaaaatattgattatgaaaataatggtaaagatcaatttattcctcttgaagatggtaaacaatatattgttagctctaatcatacgagaatggtacaatctggtattgttaaatgtagattgaatgatttaaatgttaaacttataaacgactatctaagagttcaaaccatttttgattttgcaaatattccattgccaggaaataaatattcatttaattatgctaagtcgttaagaaagatttttgaaacatcaattaaaaccagggacataattaatctacagacaactgttttattaaagggtaattcaagatttatcggaaaatcaacattagctaaaagtataagtgaacagtttggatactcatttgttgaattggattcatatgatctattgaattctggtatgaaatcagtctcgaacactgttggtattattcgaggtaaagttgataaacttgttgatttatgtgatcatcttgttatattcattaagcatctggattcaatctgtaagcgtggtgatgaacaacaagttcagcaaaaatcaattgatgattcactcagtttaagtattcttcaattaatcgatgagtatacctctaatggttctattttcatagctagtgtaaaggaagctgatgatttgaatgatatcgtcagatcaaagatgaaatttgaactagatatcaacgttcctaacgaatgtgaaagacttcaaatctttaaatatcttttagatccattaaatcttaattatgatgaaagcacatataaatattcaattagatcagatgtgaattttgatactttatcattacaaagtgctgcgttaactgcaaacgacttagtgtatattgtcaaaaatgttaaattaaatgcattgagaaggttaaggaaggaatgcaaatcaactggaattggcttaaaatcagttattaaacttgataacggatttgttaaactcattcctattgattttgaggatagtatcaatcaagctagaaataaatttagtgattctattggtgcacctcgtattcctaacgtcaaatgggaagatgttggtggtttagatttagtgaagaatgaaattttagatacaattgaaatgcctttaaaacatccggaattatttggtgatggtatgaaaaagagaagtggtttactattctatgggccgcctggtactggtaagacacttcttgcaaaggctattgctacaaacttttcattgaatttcttctctgtgaaaggtcctgaattattgaatatgtatattggtgagtctgaagctaatgttagaagagtttttgaaagagctagagatgcaaagccgtgtgttatcttttttgacgaattggattcagttgctccacgtagaggtaaccaaggggattctggtggtgttatggatagaattgtttcacaattactagcagaattggatggtatgagtggaagtgatgggggagatggagtttttgttgttggtgcatcgaatagaccggatttattggatgaagcattattaagacctggtagatttgataagatgttataccttggtatttctgatactcacgataagcaagcaaaaattattgaggcattaaccaggaaattcaatctggattctaagattaatttattagaaattgctcaatcgtgtccttttaattttacaggtgctgatttttatgcattgtgttcagatgccatgcttaatgcaatgattagaactgctggtgaagttgatgaaaaattagtaaaatataataaaactcgaatttctaatggattggaggtaataaatctacgtcaatggtttgatagaatagctacagatgatgatcttaaggttactgttcaaagtgtggattttgtcaaggccagaggtgaccttgttgccagtgtcagtgaagaagagttagctcattatttacgtgtgagagaaaacttcgagggtgggaaggaaagatgaaatttcacccagttttgagaaatgtgttaaattagtggacgttgatcgtttgcaactttggattacttattttttataaattaatagattgtatagaaagtaatactagaataaacaagaatggattatccacttgctaatacgtacggtgtacgtggtgaattattcttacaatctgctgatgattatcatcgtcaaagacacagaacaaacaaaaaattgaataaacttcgtcgtgaattaaagctcatcacaaaggataccaaaaattataaagataaggagaagattacccaaattgtagctgaaaactatgatatggaacctttatttggtgatgttttattatatttagtggagagagatttattatatgctcaggaaactagattattattagatgttcatagcttaaaacctaaggagaaatttcttgtttcaaagtataaaaaggccttacaaaatgcaaaacatttattggaagttattaagaatgaaactgacgatctaaagacattagaaatcttaacatatactgctattattgaaggttcaattgcaataactaaaaaaaagtatgatatttcactttatgcattttctattgctaaatgtgcaattcactttttatataattatcaaaaattacctgaaactataacaaaggaattttattatgaaattgcagatggtatcattgatcctgcattaaaggtttctgcatcaagtgaaaaattaaactttacagatttaaccgaattagcaaaatcacaaattttcaatattgaattgattccttatttatacaaagcagttaagattattgaatcacataatgcaacatatgttacaccaacaagtgaaaacaatattgatcttttaaaggaagttaagtggggttcatatagtgcacaattaacatcagatgatttatcattagccattatgaaaattaatgaagagttgaagaatattgatgataaaaatacatcctcatttgattcaccattaatatcatatcaagatgctattactttacatacacaagaaatggaaagaaattcaagtaatgatgaagaatctaataatcaagaacaatatattattttaacctatcttaaatataattatttattattgagaattagaagagataatacaattatgaaagatttagatgcacaaattgttgaaaatcaaaacagtaagaagaaattatcaactcaaaagattattgaattattaaaagactatttgaaaattaatgaaggaattgcagtatcattagttgaaattaatgatttaccaggtattgcaaatgatgatgagctcgttaatcttttaaatactgttggagtttatttcaaggttaagaatcaacaaaaactttctcaagcatatctgatctctcatcaatataaggaagcattagcattgattgttaactctagcaaattattacaatcatgtaaggaatttaatgttgaattagagggaaatttaccaacaaataaagatttagaaaaattaaaggtagagattgaagatgaaaaatccagattatatacattaaccacttatttcaatgaaattaataaagaacaatcatcatttggcagtaaatacattagtgatgatatttccaaatttcctaaactttcaccatcagaattattgaaacatgtctacccattaaagtttgatttccaaccagttaatgttaagccagtcttatttgatattgcatataattacatcgatgctgatactaatgatgaagatgaaattaataataatagtaatgttgtatcacatgaagttgaaactagtggaaatgtagataatgaagaggataagaaaaagagtggatttttcggactgtttggtcgttagaataaatattaatctaaactattatactataaacactgtatttatgtaagtaacttttaaaaactaattttaagaaaaacagaaaagcttattatcaatcaagtatagacaccgaaatgagatgaaataaatagaactgtaaaacttaacgatattgcagagatagcagctaaaattgtgtataatatgaaattaaagattgatttagtgaatgaagatgtctttgcattaaaattgaatgtaatcatcaggaagaatagcgtagtgattgaaatcaataataatgtatagtcattaagtgatgcgctgtaaacaggtgtgaaagatttatatgagttgtataatgcctatatgttaattgatgttagtattcaatgtttattttgattgatgtaatttaatgtacatactgtaagttcgttgaatgatttcattgcgtatattggttgtacaatcaaagaagagatctgaatgaaacgtgtttaaaagaaacatgcagattatcgattcagagcattaatttgtaccagtgaggaaaagtttcatgaactaaaatttattcaaatctattgatatattaatttcattaccaagtttatatcgatatttatgttttaattattagacattattaaaaagttataagattatatatccatatctatatgtacatagtcattagaaggttaattgatcatagaaagtaatcattattagtaaaatcataataaacatcattaggagatatggttttaacataattattaaatcttttaatagtattaaaaccatctaagagagtaagtaaagtccattcaattgcataatctaaaggaacacgatattttgtaaatcttgagaacataaagaaataaatttctaataaatgtataataatagttgcgtagaaaatagtattatgataaggtttaacacttaacataaatggtaaataatttgcaaaaattgtatcatataataaatcggggtaataaaatccaattggtaataaaataactagaaatattagaaataagttaatgaatgatgttggataagaaatacctgaaactctaatatgacttaaatttcttgcttttgcagatatttgtgccatttcaataatttgattttgtacatcaaaccaagattgacatttatgtggataaggaattggtcttaacatttccatattaactaaaggatgtttaaatgatataactaattcagttaatgataaacttttgattttaacatttgaaatattatttgaagaatttgattttgaattaattaaagttggagcttgaccgtttgaattatttaaagattcatgaggatctctcactgataaaggattattatcaggatttggatcagttggaatatcggtataataagttaaaatatctaaaacggaatgtctataaacagtattaaatttagataatagcatagcctcattaggggaatcatttgatggttcattattaatatcagacatatttccgttgactggaaaggtgtaataatactaataatattcttgtatagtcagtcctaacaatgacttattaatgcatgcatctcttatacaactcctacaaaaaccaaatgacgtgaaaaaaatacattacgtaacagtcgcgtctctttaaggaaatagactatttaaattttaattttaaattttaaattttttgacagtgagaacctttgagctcatctgatgcttaatatagtcaacatcaataattattaattgttttgccacttttgtattgtatctttagtttttatttgatttctctttaatctcttcttctgctaactcaattggcttataaagcaatgtcctctgctcaatctcagggtcgtgtcgctaatcaagctaatcagccttctcggtatgtatactttttattattattagtcaacttattttaatttttaatatgtgtttcaattttggcagtccccatttcaatttcaattatctgcaattctcccgttttaacccgtttcctttgaattttcatgttatatctattatatattcatatatatatgcattgttaattatgcaattatgatttattagttatctaacatgaatatttttataatggaaatccctcttttattcatcatgatttcaagtttatttcaattattttattgctttgtatttttttttgcttttacttctttttttttgttttttgcttttcaactgatagtcattacatattaaaagccaatattgattcaattgacattaattactattattattactattattattatcatcattatcatcaatgttattacttataaaatttgttactattgttattattagttattatactcaattatgatccttcagttgttattatcattgcatcagccttttaactattattgctcaatcaacttatcacaatgaatctgttcttagacttaatatatcatatcaaatacaaagattccatatttcactttcttgtttttatcttctccttcttctttcttcaaattgattttataataaaccatgaaattcgttgatcgtttaaagggatgttatagaaatattcatgaaaaataataattttataatatctacaattgaaaattcatttgaaaatgttaaaactcattcgataatttattacaaggaaactaacatataatctcttcccctcctttatttctttcctttttttcatctcagaaatgagtttatcaatcctgcattaatgaagcttaaacttttagaagtcttaagaaataatgataaaacaaaattaaatgatttaattagtcaaattgataaaaatatctcaaattatgatttttataaacttaaaaatgaattattattatacgctgttcaagttggatctttgtctattgttgtgtatattgttgaacatgatctcattgatgatattaattcgcaagattctgatggaaatactgccctacatttagctgctatttctaatagaaatgatttgattgaatatttaatgaatttaccaaatataaatgattgtgtttataatcttgaacaaaaacaaccaattcaatgtactactagtattgaaactgctcaactaatggattttttaagaaatcgttatattgagaaaattgcctcagaattaagaaattcatttgaatcaagaaattttgatatgctagaaaaactgttatcaaatccgagagataaagaattattagatattaatggtacagatcctattacaagtgatacagttttaattgaatttgttaaaaagaatgatcatgaaatggttaaatttattttaaatcatggtggtgatcctttcaaaagaagtttatctggtaaattgccagaagagttaactactgatttagaaatgaaaaaaattattgaagaatcatttacaaaacaaaatattttagaaattactgctcgtcctcaagaaggttctccatcttataaaggatttttgaaaaaatggacaaactttgcaggtggttataaattaagatggtttgttcttgatcataatgcagtcttatcatattataaatctccaaatgatatgaataatacttgtagaggtttaattcatttagctcatgcaatgttaaaagttgatagttctgaaaatacgaaatttgaaattattatacaaaatccttcagatggctcacctgttaggtggcatcttatggcaaatcattcaacagaggctcaaaaatggatttgggttttacaaaatgcaataagatttgctaaagattctgaaaaaactcaaaaaaaatcaataactttaaaacatgtactacatgaagatttacccaatagacatcattcgattggctcacatcatcatcaaccacaacaacatccagttaccattcctgaaactgatacattatcaaatgaagatattaaacatgatgagactagaagacctgtttcctccattatttcagaagctcatgaagctgcaaatgattttaaagaattattgaaagctaccgattcagaaactgagttaccattatccaataacattaattcagatgatgaaactaaatataatactaataatagctataatgataataataataatgattttaatgatgatattaaccataatgaacaaaatactaattctatttccgatagcttaagaaatcaaataggccctgtgcctgatagatcttccctatatagcggttcaagtaaaccactatctgttgctggtattgaaagtaattatgatcataatagatcagcttctgttggatcattcaattcaaataagtctgcagcttcagaacattcaagtaaaaattctctggctaaaagtttatacaagaaaccattaaaaaagttatccaaaattggtagaaaaactagagattcattcttagttgacaattcaagaaacctaaattctccttcaaaaactactctgtctaaaattgattctactaatgagtcaattatttcaaacggttccagttttatgtcatcaccggatttaaatgctagtaacggttttgatatgttaaactccccaagtaatgttgaaggttatgatgattatgaagttgattacaacgttaaatctaataatattaattcatccccaagtccaagcgctgcaaattcaaacaacgatttgaatgttgttagaaatcaaatgggtatgcagttgaaaacttttaaagactttttgaatacagcagcatcagatgatacaatctctaaaaaagatctagttgagatgtccgttggaattttaaatactttgaatatgttaataaaccaagaaggtgattgtgttaatatcaagtacaatgaattagtcagacgtttagaaaaacaacaaaagatttcctcaatttgggaaaattctattaaacaattagaaacagaaattcaacaaagagaaaataaaattgttgaattggaagataaattaaaggctgttaagaagtctttaagaaatagtgtcaatcatttacatgcaagccaaaatgttcataaatttgaaaatggtttacaaaacttaccaaatgaaattcaacatgcttataatgaaaattcggctgctaatttagcaagacagagattaactgcaaatattggtgcttcaatcaaggaaatcccttcaattccttcagatgatcaagttagtaatgaacaaaaagtagaagaagaaagagctttacagcgtcaaaaggaattacaagaaaaatttaatattaatgcctcaaataatgttccagcagcaacactaagttctgaaatcaattctcagactgcaccctcatttccacctccgcctgttccatttgttgatccaactttaacggaatttttagaagaaactgatgatagtgatgatgaattttttgatgctgaagaaagtgatgaagttaaggatatgtctgttttagcaagaagagaaactatgaaggcacttcaaagaagggcttcatcaaaaaattcacctatctctccaactgaaaatgttccaagtcctcctgttccagcatcaagtcctcctccaattccttctttaaatgttgaaacttccaaagctactgttccaattataaatgagccagatgtttatgatcaagaatcaaatagtattcaaaattcagaaactaagttatctgaaaagaaagaaaatttaaagaccgctgaaccacagtctgatattttaactctgaacgatgttagtactgaagagttccctaaatctaaatttgaaccaactgttgattctcatggtcattatgttgtcaataaacacgaattagttagtgattctcaaaatcaaagatacaataaaattcttaaagatcaatcttttgaagggtatgaagatcctcttagattatctcttgcacctgaagataatcgtccaaaaatgtcactttggggtgttttgaaatctttggttggtaaggatatgactaaaatgactttacctgttacattcaatgaaccaacctctttattacaaaggaatgccgaagttattgaatactctgatttattggacaaagcttctgcaattgactcatcaactttaagattggtttatgttgcaacatttgcagcttctgaatatgcatcaactgtcggtagaattgctaaaccattcaatccattattaggtgaaacttttgaatattctagacctgataaaggatatagatgttttgttgaacaagttagtcatcatccaccaatttctgcattagttgcagaatctccaagttggtcatattatggtgaatcaaatgttaaaactaagtttttgggtagatcttttgatattaaacatctgggtacttggttctgtgaagttttcccagatggtggtgtcgaaactaaaaacggtggaagaactgataaagaagtttattcatggagaaaagtcaataattctgtcattggtatcattatgggtaaccctacaattgataattatggtgaaatggaaattcataatcatatgactggtgattacatgaagtttgaatttaaaccaagaggatggagagcatcatctgcatatgaagttaagggtgaagttttcaatgccaagggtaagttggtctattatgttggtggtcattggaatagtaaaatattctgtaaaccagctgatgataagaatgctgaaagatttttagtctgggaagctgctccaagaaaagaaatgatgttccatttaacaaactttgcagctacattaaatgctcctcaaccccatttattgccaaaggttgcatgcactgatactagactaagacctgatcaacgtgctatggaaaatggtgattatgatttagcagctgaagagaagaatagagttgaagaaaaacaaagagaggcaagacgacaaagagaaatgaaaggtgaagtttaccaaccaacattctttgttcaagacaaacatccagttacaggtgaagcattctggaaatacaagggtgaatattggagtgatagaaaagaaggaaagttgaaaaactacaaaaatattttctaatctatatcatattgaatttttctctactcttttatgtcttgtacattctctgatgccatatttaataatatatatatatatatatatatatacgatgatcataataatactatacagttatgaagtgtttacttttgtgttttaatttgcatttatattttgttatagtttacaaactttgttatttttaaacctttaaagttttcttggtatctaatctatacatttacatgacagtatggaaataatttaattttattgtctcttcatacgctaatgtctattataatcttcaaatgttcttggacctctaactttcgtaggtgaagaagcaatgcttggtatacttggaatattgccctggtggtattgagccagattcggagctgagtttgaatatggattggatgtgggataaaaattcatataattattactggctcctctattttccttttgctttgatttaagcattaattgaatatcaggaggcagttcatttaaaatttgagttaatttatcctctagtaaacctttaaattctgatttcatcacctttttagcatcttctaattgtaatgacattttctttctttcttcatctaatgatttttcatactttatcaattgtttctcttttaataataaagactcctcaaatctacctattgatgtttcctttcttttctgttcaatctctcttttagttatttcaaattccctttgattgagttcccattctcttctataaattttaaaggaagtttcctgtaaaagttgattaacatcagctctttctgttggttcagttatcaagcatgcactaatacacattcttaatctattggaataatgcgatggtaaatctgggtatgtacctattttgatcttctcctgtaattgtgcgtgtgttttagctgtaaatggtggtgttagagcacataattcatacatcacacaacctagtgaccaaacatcacatagtgtattataagcttgttctaatataacttctggtggcatatagtatggagttccaacataagtttgagtaaaatgtgtgtgtggtgaaagtgcctttgctaaaccaaaatctccaagtttaactgtgtatttatctgataaaagaaaaatgttttctggttttatatctctatgaataacaacctgaaaatcagatattgaaggaggtttaatttcaggagttgatttaaacattgatgtaactggctctatatttgttccataatgacaacgatataatgcaagaagtgtttgagtaaagatttgccaaattaatgtttcgggtatatattgtttattctcacggtatcttttaataagttcagatatatcacctccatcacaatattccatataaatgtttaacattttattattaggtattttctcaaatccataaacttccacaatatttgtatggtttaagttttgtaaaatctcaaattcacttgataattgtttctcctcttttcgactcattgatttatatgatatctcttttctgacgaatattcgtccagtaggtttatgcaacactttacggatcaatccaaaggatcctcgtccaatgatatccagatcttggaattgtgcagaaatttcttgtgagcccattagttattaggtatatatatatatatatattcccaatgattataacgtcaagtgccgatttgttatctatcaaaaatcaataatctactaaatttttggtaaaggaagaaaaacctttgaaatactctacaagtttcagtttcaaaaaaataatagatcaaaatgatccaaaaatggaaaacttattatgtttttatttttcctaaacgggaatagttataatttttgagtgatacctcgtattttctaagtttaacattatcgttaaatggatcaatactgccattgataagctatagacacgtttctatcatgaagtttttgacagctatttagctatattatacataaaatctacttagagaaagtccttttcaaaatttaaataaaaaaacttaatttgaagcccatttttgaccagtcaaagcagtgaaagcttcaacatacttttctgatgttttagtaacgatttcttctggcattgaaacacctggtttaccattgacaccattagaggttaaccaatctcttaagaattgcttatcgtatgaatcttgggatttgccaactgcgtatgttgcagcattccagaatctagaagaatctggtgttaagacttcatcaactaaaactaattcaccatcatcagttataccaaattcaaatttggtatcagctaaaattatacctctagtcttagcataatctctagcctttgtatataattcgactgcttttttttcaactttatcgcaaacttcttcaccaacaattttagctgcttgttctggagaaatgttttcatcatgttcaccttgttcagcctttgtagatggtgtgaaaattggagttgggaaaacttcagattcttgaagtccttccggtgctggtaatccatgaacagtattagttttcttatattctttccacgcggaaccagttatgtaacctctaacaattgcttctaaagcaattaatttgtgctttctgacaagtaaagatcttcctgataattgatttttatattttggttctgataattcctttggtaattttgcaaagatttcttcatctgatgatgcaataatatggtttttgatatcatcctttaaaaaatcaaaccaaaaaatagaaatttgagttaaaagctttacccttatccttaataccattttccattataacatcatatgcagagattctatcagttgcaacgaaaagaagactttcaggatcagcttcgtaaatatctctgaccttaccctttgcaattaatggtaaaattccgtctaagtttgttgatgtaattgacatgtttatttattgaaaattggctaataaggaacttcaaaagaaactagatgaatataaaatcaaaatcggagtagattttaatttctacattaattagttattaagattaaggatgattctctaaataattttttgttaatcgtggtatttgactctggcccttgttcccaaaaaggaaatttcaatcaacatgaaaatttgtaaaaattttatttttggaaagaaaactttttatttcacttgaaatctgcccttctccagagaactgcttagcaataacactaattagaatgtccgggaataagagaaaaaatgatttagaaaatggaaataataactccaaacgatctcacaattcaattgcgggactaccattgaaaccaacttttggaaccgaattacgaaatcctacatttccggctaataatcataatttgaataataacagtaattatgataataataataataaagattctggtatatccaactttgtatcacaaacgcaaaattatacaaatcagcctaatcctgaaacattgaaacttattggaaccttaataaacacgattcaaaataatcaaaatcaacaaagtcaagctcaaaatcaaggtcaagttcaaggtcaagttcaaggtgataatatttattctcaagttccttctttatatacacaacaattcccatcgcatgaaaattacgtacccccacgattaggggaccatcctccatatcttggaaatgctactagagaccattttggttataataataactataacagtaattacaacaatatttataacaataataataccaatagttataataatatcaataactataacaataactataacaacaatcactataacaatcagtataataataactataacaataactataactctaaccatcagtatgtcccgaccatcatgccaaattatacgccatcacctcaagtattggatcaacaaacaaaactgcttgatatgtacaataattttgtgcaaattcaaggaactccttcctacaatcaacaatctacacccaaattcaatcaactcccgttatctcagcaactggatgaggatactaaagttaacattccaccaaaaccaaatatagtccaaaataaaaaacagagcaagaaaccaaaaccacaaagtagtaataaaaaggccaaaggaaatatcaaaaatggttctgacggtgaagacaattttgatgatatatcagatgacgatattttagatgaagagaaaacgtttgccattcaagggactaacattgtttttgaaaatgaagaagatgttgcaaaatggattgaagagagaaaaaagaattggccgaccaacaaaaaggttgaggagaagaagaaggaaatggagacagccaaaaaaatagcagacaatctaataaattcagctaccaaatcatcaaaatctaaaacaaaggtatgcagcttttggcttaaaactaaaaaatgtagaaatggaaaaaactgtaagttttcacatgatgtttcagatttaccaaacaaagagatgaatccatctaagaagtcaaacaacacttatttcagtactaaatctttgccaaatcataaagccaagattgtacatggaatccctattcaaattccgcagagatttacaccattaagtaataaaggtaaatccttacataatttaatggttgaaggtgaccaatttaagaaagaaaatttggatgttatcagtatttttgaaaagcttgttaacaaaggtgtcatcaataccgattggaataaattgaaaaaaacaacttaatctagacgtcgagtgaatttcatatataatatttagaactatataatttgatcgataccaaaataaaattttataatgtattacttttctaattaaaaatgataaagcatgtatctatataaaccttacatacctctaaatgcattcttacttgctcttcttcttccttcagtaacttgtttagacttaccttttctttcactactttcgtcatctcctgcttcaaatctaactttactgacttttttagctggtatgaatgaaatttcgccttcaccaatagcattctttcttattcttgtatttgatctcttttctttctttaccttactatcatcgttcattatttttgcttgtttttcaaatgataatgattttgatgttttaattgaatttatatcatctgctttatctaatgatttcattttagttaagtattgtttagcttcttcacgttcttttttcttacgttcttgtttttttttcaattgttctttcagtttttgtttataaacttctttttcttcttcttcttcagagtcagattcggaatcagaatcagagtcactcaagttatttccctttttattcttagacaatctttcttcatcagattcttctgcagcagttaatggttttggaccagctaatgaagcaactggattcaattgtttataatcatggttatcttcatcaatttggaaccttggatcttcaaacatttccttgaaacggtcatcattaacaactgtttcggcagtttctgcaccaagtttgttttgtaattgaccaacatattctttattaactttaacctttgtatttgtgatagtaccagaacttctaattctagattctctttcttgttcaattctctttctaatttctctttctctttcttcttgcattgagttaggattagcaattaaattaaccttatcgtataattcgttatcaataaaataaccatgcatatatgctcttaaaacatttgaaccaatcaaatgtgatatacccaatttggcaacatcttgctttgtcaagaatttataattggagtaaacagtatctgaaggtttttcttccaattcttcagtaatgttatcaaggaaagaacaccatcttggagatggacctaattgtgggatataatatgtgtgcattggaattgattcatttgccataaagaacataccagaaccaggtatatgttcaacatcatttatatcaacacttggttccatagcagcataaggtttaccatcatctctattccaaattttggcaatctttttatcagatgttaagattaagtttaagttttcattaccagtttcttctagccaaataatttttttaattccaaaaccataaccttgatctttagttattaatggatgagaagttctcaaatcataaaccattgacatcccatcggatgtaccacatgcaaaattaagactgttattagcaaatttaacacatgaaatttcacttccattttcatttgcttcaggtatttgtaatttaacaactctttgttttgctcttggatcccaaaattcaacggtaccatcttctaaacctgcactaaataaaccatgaattggatttatatcaattgaatttacccctctctcactttcaatattaaaaggtttcataaatctaccttgttctaagtttaatctataaatttcgttaccacttgaaccaacaaataaatcacaagtcacatcattataagccaaagatctaccaaattttggaattcttattctgtgcttcatttcaccttttatttgaaattctaaagatctatcattttgcaaatgaatagattttgtccaatcatcagataagagtataaaatcaacattttcagtatttgtatgtctttcaaatttaagtgaaagattagcaaaatcataaacatgaatttgaggcttataagttcctgtagccattgcaaattgaccatccttggtaactttgattctattagatgattcactgaattcaaaatcttgaattaattcaactctattttgataatcgatatcattttttaaagatctcttcctttttctttctaaccaatctggaagagatttcgatacattagtaccggaaatttgatacacggatgtatcatttgaagatgcggattttaaaaccattgcttgttaggatactactgaaataaatccaataaaatgaaaaaaatgttaataatcagtactgaaatattatagtaacaaaagatttttttgatgttaaaaattttttttcttgcactctaagagaagaacctcgtaatctcttttgtttacgtaatgtaatctcaagaaatctgttaagagtattaatggatggtatattcccacattgtgttacttttcggtgatacatttgtttggtcatctattggtcaacagagaatatggatctttctaaacttactaatcctgaagatacagtgcctttggatgatgcaacaaaggtagtcaatggaaacaatgttgaaatcaataacgacgaaaacgtcaatgttgaaaatgatgataataagaaggatagaaatgaagatgaagaggtcaatagtgacagaccaattgagaatgaaggaaaggaaacacaagtgaggtctactagtgattatagaagattatacaattatcttttggaaaagtatagaaatgctgttcgtagtacgaaagtactggaagagtttgagctttatctgaaaaatctttccaaatatcaacaactacgaaataatatgcttattgacactctcaaatatttaaatgatcatgaaactttataccctatcgatcctacgaacacagaaaagctaactggaaaaatgaaaggaatagaaaagaatgattcacgtttctctgatttaattttaaaattgagaaaattagaagctacagaagataaaagtaatccaaaaaataacataaattcattcaacgatatagtgggtataaatgatgcattatctagtgatttatctattcttgaaaataatgcatttccagatttatatgcaggaaattttgatttattagaactagtaaagaagaatccttgttttacaacagaaatcacatctttgacagaactcaatgagcaaataaggaaagagaaagtagaaacaattaagagaattgaacttgagcatacgcatcttccacgtaaaagaaagaaggttcaatctaactcagcaactcctcaacccaatgatgatataatactgaaaggtaatgataatactgacgaggttccaaataaaagagttaaagtagaaagtcaactttctgtataataatcgaattaataaactatttatctataatatgtactaatgctactttagctttaaaaaaatatacgttttcttttgtttataaaaattattcaatcacagcaacctttctcttcaccttcttctttggtttcttcttcatctctactattggaacttcaatcttaatttcatccttcttagattgggcatcatcatcaagagttctttcgtatggggaattctccgtttgatattcttgggcaaaactttgtttgacttcattttctggttttgataaaacaacagatgctaaggcagaaaaatcactatcaaatggtgaattacttttctctgggattgatgttttagttatctcagcttcttcatcatcctcagcatcaaaattgatgatcatctctttcttgtgtttcttaggtttagacaatttacggggtttcttctcgacagtaacatcaatcaatgtattgttttcgttttctgttgttgagctattgttgacatcgactgtagatatgtaatatggatcattttcgtgattgttgactatttttgtgctgtctacttcaatattagaatctgtggatacagagtcgcttatatcattatcaccatcttcgtaatcgtcttcattatcgctgtaatctaaattcaagtcctctaaaataagtttattgtataagttttgaaactctacaacagattcatcataatcaaatttcttaaaatcaaatcctgcaggtggtaaaattttctgctgagttttcagatttactggtttcatatcgcatgatgagaataactgactgtatccctttgtcaaaaacattggtgggtattcatagcctgtatctgaagattttaaactttctaattgcacctcaattgattcctcaactaatcttaaaacttcaatataagataacgcacgttcttgaactttaaagtttggactgtgttcaaattttataaaccagtttataactttaattataacattcttaataaattcgaactgggattctgaccattgaccttccccatatatgccacaaaatttactaaatgactttgctattgcgtgaatataagctaaaattgtatcatcaaagtttgtgtttcctaatgtttcgagcacactctgactggatatacaatcaattatttcaataagtgatactttttcagccatattttcatcttcctcatcaatactatcatcttcatcttcttgtatatacacatcataatattctccaataatccaaacacaattactaagaccatttttaaagagagctaaatctttgtttgtatcttttgtaactccaattatttcaaggcacatagtcactaattccgatctcacacttggaaccttcaaactaatatcaattaattgttttgaaacaattagatcaacattttcaatattattaataatgttcaaattcagaatatctttcaaaacacctaaataccatttaaaacttggtatattgatgtaattattcatggagcatatgtcaataatcttgttaattaacaaatatttgtatttttctgtcactacaataggttgttgagatgagccaattaagaaagcttcgcttataccatcattttcatcttcatcatcttcatcttcatcctcattatgttcactatcggcaactaatgctttatcgttcttgctactcttctttttcttcattgctgttatcttggaatttatcaattccaattgttcacattgttgtttgtatggtaataactgaattgttaatcttgtaacaatggccactatatttttttgcgtaaccaatgaatctacaatttcaagagacttttctctaattgtagaatcaacatcacagatggaagttaatataatgcttgaatgtttttgaattaaactttcatgaatattacaagttttaataaaagctaatagtcccacatattttagattttgatcattactcttgaaaaattcaagtaatttgtttataacaatttcagctgtttcaaaatcatccggtgataacatatttccattaagtatagcattaatacattcatattgtaaagacaatgcctttgatttggctattaaagcttttatttcaggtaaaagtttcttctttaatcttggttcagttaatgaaagtgatgcaaaaagtttcaataatctgataaccatccagttatttgaagattccatcatcattacaaaaaaccttggcgctagctcgatatagttaactggattcatataagctaattcacaaatgacatttacagtagctgataccactgcattatcatcatcttcaagtctatcaacaattctatcaaagtatgttcttaatgaatcagggtttttcaaaaatattttgaacattgctaaaactgccttttttctaataattggttttgaatgtgttaatagttttgacatatcatcacacacatcaactgctaattcctttgatacaacagttgcaattccactaattgctaaagaagtttcaacatagtgagcagaattaagatctttctttaataaatttgtcataagcatcaatgcatcatcgttatcttgtctttgtaatatttgagttgcagctaaataaccaattcttttatgttgaaatttttgagatgccattacttctaagatattaaatgagcaccaacttgcatcaaagccatacatttctaagtatgttaattttaagattgcacctgattttgtatctaaatcggatgttcttaactcagctttacattcctgtattgatttatcaaagaattgtgctaatttctcttgatcattattatttgcacgaatacctttgattaaatcttctaatgatttttcaaaggtaattccaaacggtcttaaacgttcaatcatctccatgatagaaaattggactttagccgttgattgtctatatattaatgttgaagagaatgaaaaaacagcttgtcatcttggtggcaggtatatatctcaatgcatgttttggaattttgaattcatgtggcgagcagctcaacatgcacctataaattaaaattgacttctttcgtttcttttactcgtactttactatcagataatacatattaaggataatagttaataaactcacggtattggtgaagtatttgtgatttaataaaaggcttttatgaattgatttttagttcaaatcaaaaaaaattgtgattgtttcatgttttgtacgatcgtataacaaacagtatggaaagtaacaataatgatgttgacctagataatggttcagatatttcatcatctaatgaaagagtaccaataattgatgatgatttaccgaatagtattttaacatttgaaggtaacttgcgtggtgaagacattgatttgaatacgcataataattttaatgatcatcggactatttgtgagagtttgtatagtgaagataacgaaggtagtagtgatgttaatactgatagtgacagtgatagtgatagtttggatattgatagaatatacagtaattcatcatatacctgagagaagagagaaaagttcacaaaatcaagagcaacaattcaagtccaattgagtatttaattggatcattaaataatgcgttaaattcattagaatatgataaatcattagttattcaatccaaaatggcaggtgaattgaacaataccaccaatcaagttttaaaaaccattgaagatcttcaagcttcattaactgaacaaatagctaaatatgaaagattgtcaaaggagattatacctgagattgaatataatttgagaaaagcaacaaaaaatgctaagatacttaccaaatatgttaagagtacgtatccaattgagtattcaaagggacgttcaaaggttttagagaacctaactgaggatgaagaaggtctttttcgttaattgtcggggctcagcattttttataggccctaatgataaagtttacgaaaggttgcttgtcattcactgaaatttattctgaaaccactggtttgatccactgtatactaaattgttttaaattgtatattttatgtatgaaattgatgtgaattttatgattactggagatctacaaattactacttactatcaacatactcatgacatgcaaaatgttgtgtttttgattttgatgtcgttttaaactaagaaaagatacctaaactaaaggatttttgaacaaataaaaagctaagtcaacataataatacattaataattattaatagaggtttataagttatttactataggtttatatctaatatatctgttactaggaaaaattatatttttcaaatttgtacaacttttcttaatttttctgaaaatgtttaaatttttgcaaaattgcccatcacgtgactatgcgccacaatgatgaaaagcattttatttatctgctgcgccactttaagatttccttcatcatgatttcatcattggatgttgtgaaagattatataaggagattgatgatttgaatagttcctgggaaggtgctatatatacacactaaacacactaaaatacacaatgagtatgctcaatattaacattgagtccgatagaaatactttattggacttttatcaactgaaaacccttgatcctaaaagttttaaacaagatacgatcccatcaacattgaaagttgatttgtcaacagaggatttatctcaaattcccaaggaagtagtcaatcatcttttgggtgataatatgaatgatttaaaagacacaaaacatcaaataagaccaaatagtattaaaagacaagggaaagatcaatattctgatgcactgggatttcatcaaaacattttagatgatttgattgataaagatattttagatgatacaagagatcctcaattaaataaatttatggttgattctaaacttttcaatcctaaattgtttctaagtgttattcatagtgataaatctttaaatcaattgatgattggtattaaaaatctagaaaatgatattgaatcaaaaaaaccattattacaaaaattaattacaaataattttgagaaaactttaaacagtaaaaactccttggataagatatttaatgagttttcaagttcgaatttaggtaatgaaattgataatttaaataaaaacttagcttcttccaacaattctgctaatcaaatgttaaatccaattcttttaatgatatccaaagaacaagaactttcaaacgctgtgaattatgttaaacaaaataagtttttcattgatctgcccaaaaaactaaaactatatattgacgaagacaattttgattcagttaattaaagaatatgaaagaggtgtctcaacatatcaacaaatgaaattagagcaaaagaataatgcattatttgataaaatatggaacacagttttgaaaattataaatgattataaattatcaatgattgaagatctcaaaaaaattcatattgaattaataagtagtaattttaaatcgcaaatcaataccaagaaatcaaattttgttttacttataaaaagaattattgaattgagtccagatgaaaatcctatcaaaaattttattgatgtacaatatcaatacattttaaagtatcttgataaaggaatggccaaaataaattatgagagattatataacgctagaaattcaatttacaatctctatgataccactgatatggctgatcaatcccttataaatgataatagccttttaaagatgtcagcaatgcgtatattttcaacatttagctctaaaacatttagtgaatctgaaataaataatacttctgataaatttgactctctaatagttacagaaatatggaaatttgtttttgattatgttcataatgttaccgaggatgttatcagcaataaaattatgagatttgaatcaattgttgaatattttgtacatgattttcaagaaactttaagtgatagagcaaagaattcttcatttacctttgatgctgcttatttgaaagatatgaaagtatatttcgaaactatgtcatcgaaaatttgtggtagactcacttttcttttctcatgtacatttgatgatttaacaaatgctttgaaattaacagcagttgaaggaagtcatgcagttttaccacctgtgggaaagtcggatataaataatcccatttcttttggttttattccaaataacactaactcaatttctacaatatattcaactgtcaaattattcaacaagatacaggaaaaattatcacaattaaaggataataatttagttttaaattccaaagatattaccgataaaatcgatactgcaatatttgaaatcaataaaaatatgattaagggatgtttatcactcttactatctgatatcagaaaattagcactttgtgataatatgcaacctaacgaggaaatttttggtgcaacaaaattagtgacagtcttgttaaattactataaagtgtttatttcaaagttacatgaacttattgtatttaagaatgatgaaactaagactataatagaggaaacatttcaaaaatcatttgatttactcttagaaggaatgattgaaaatattaagagaaatattgcaatcgattcatatagaactgattattactatctagccacagtttataatatgagaaacttctccaacgaagttcttccacagattttaaaatcatttgacacaaattttcaatcagacttatcaactaagaaagacttagctattttcaagaaaataaaatcatacgaatattctgtatttgttgattacatgaaacaaccaatttctgttctaaaacaaattgttgatacaggtatttcagaattggaggataaatcatatggcatttcagataaaattgcatcaggagaaacaattaatgtctctaattacgttttgaaagcaataaacaatatcaacaatcttaaatccaaactacaaaacttcaatataagagattcatttataagtgacgttaaggcaagtttaatagtccacttacaacaaagaatgacgtcaagtttctctgtagattttagtgatgaagcgaagtatcaaatagctttggatatagatgttttattaattctaataagcaagtacaatgagaaatcacatcaacaaagtagacttgatactaaaaaatttgaagaagcatacaaaagtctctgtaagaatattgatacctcatctttagagaagaacagagatataaacttaagttttaattatgttcaatttgtctgctttacaactttataatttttgaatcaaatttttttataaattctcaataatgtataaataaatgactagaaaagtgttgtacaaacttaatcctttaaaacgttttcaataagatcatcaagttccgttaattcatcgattctttttctattctgtatattctcagctagtttgttatcatccatactaatgttggaatcatatcttaaactgttattgatggtttcataatttctcagcaacattaaactgttattatttgatattgattgtattgaattttttgagatattctcattattaatagttctgcctgagttagaagttgaattactttcacgaccacgcttcgcaaatactgtagggagtaaacctgaatttgaaaactttcttctcttcatttttgagacatcaatgactttgctcaaatagcttatttttcttttaatcaatgagttttgagcattactcaagttcttttgagataatatatcaaaaccggaactctcagacatagaagttgatgctgaactttttgatattcctgtatctcccgcataatttatactactacttattgtaacatctgatttctctctagaatacattttagtccagactttttcaacaaaattgttcaaattgttatcaagtttatttagcgtagagacaccacaatcacttattaatttagctgcatttagtttgaataaaccaactgatactttctgcgacgcgatctcttgtaacttaagtattttagaaacttcaccattagccatatgaatattaaatgaatcaacataaacaaccaaaatggaaaagttattatatttagagtatagttttaaatattcataaatcttttgaattactaaagcgtcctttgccaaacatctcaacaatgcagtccttgaagatttatcaataccttcaattgtaccaacttgcaaaattacagacttagtatcttgaaatgatttttttacatcaaaatcatcaggtaaaactttgaagcttagcttatatcctgtactagaactagattctgtataactagattctgccgacacattgaatctatccaataaccatgatgtggatatattttccgttgaacgagcaatgataagactattcaaatcagatgttggggatatcttctcaaaagtattacgaatttggtctatggaatttttctgttttataggtttttcaactttaacaatatttaaattagatgagtcaggtctgataataggaaccgaaggcacaacaaaatcattgaatctttcgatctctttttgtttttcttcatctatcttctttttttctgataaaacatgtagcttctcttgaattacatcaaaatattttttatattgcatcttagtattgaaaactttagctctagcatctaaggaaaccaaatatacttgttctttcataaatgcttgataaagttctttcgataatttatccacaagatcttgtttcgttctagcttgtcttaatcttttagcagcttccagttgttttttaataatttcatttgatagcttgatagcacctttcatggccatatcctcaacaattttcattgcttctgttttaaaggcaggattatctactaatcttttgaccggcttggcttcaacgaccacttcttttttggaagattcaacttgaggaggcacttggtctatttcttttccggtaaacttgaatgctggttgaatgtcaggttgatttaattcagcaaccacattttcattagtttttgaatttgaaaactttgctgttgtatcgaaagaacttaaagatttgaatttctgatcactgttggttcccattgatggattaacggtaggtttgttcaaattaccaaagttaacatcgagtttagagttgacttgaaaagaagtaggattttctgttatttcaactttatctcctattacttgattgtttattggctggataaatgatgcaaaattatttgaaggcacatcatgcacccgagaagaattggatagatgactgatttttgtaaagttggattccaaaatttcttgaacattttcagtatttcttttagcttcaacaaaacttcttctagcaacctcttctaaagacagcggtgatttcagttgaaatggtggattaggtttgttaataatgtcaggcatagttcttccacttatcatgttatctatttttctagtataagcttgtttttgagagggtttgaatcctgattttaatgcagttatttcaacacgagatacgttaaattcagagtcaaaaaatataggcaattgatataatttacatgttagctgcaattgttcttcatcattatattctaaacaatcaataagttccatggttgttggtagttttttagatttagcgtgatatgctcttccaagcactcttaatgcattgtatcttatttcattaaaatgtatttcagcaagagatgctagcaaaaagctagttttggaaatatctaagacagatttgaaaaattcataatagtctgctatacctgatctatcggaagccaaatttctcagcattattgcccgttgaacaaggttatcatttataatatattcaggtaatgtttgaatatatctgtccaactctgaatcttttatttttgagattaactcatatgccctaaactctggctcgtttatacatttaccacctcttgaacggacatcgttatacatatgagtcaatgtttgtaaagaattattaaactgctcaacttcttgctgttgttgataatcaggatcatcagcacctgacataatatgcaatgacaatatatgaatcctacaaattttttcatgacagtcaattgattcaataccagaataattattttgaaaagtgaaatcttgtctaattgatcttgttctatcccagatgaaagattgcgattctgggagatgttgaaggatatttttgattatatagtccaacgtcttttgtaaaacatcaggagatctaacatcagatggtaatgagggtgcttgcccagaaggtctcataaatgttttcaatgctagatttcttgatattttatttgtgtttggatctttttcccattttgaaacttgattcttaaaaactcgttcaaccctttcaaaggtcggacacatatcctgacagcttcctttaaaaataattgcatcatctaatgattttttagcattttccttatccaccaagtttagcttttccatttctttcctttccttgcttctgtacccttgaaattcttcaaataatgattgtgcatctccattgaattcactttctctttctaataacatttgttgattctgaatatcccactggttaggagtatatgttgacatatcaaataaaacattcttttgaagtaaatactttgggacctttggtgttctatgttttactttttgaaagcctagtaattcagggttttcaagcatctttccaaagtattttgtttcaaaactattcgtgtctatcactttatctttctgaacagaagaggtttgaaacggtatattgtttgagctgttagtatcgactggtataattgaattccttgtattattattttttggacggttaggtacacttgtaggttgtgacgcgttgctaccacttgttgcctctattgaaacaccaatattgttattattattttggttatgcttgtagttattagagaacttcgatttgttatgttgattgttgttttgattttggtgtttgaattggtttctggaaccattgacattattattttgtgtatcatttgtaaatggtagattattatttttgttattgttcataaaagctgaatgccccatggcattgctcgagttagacttaataaagttgccattaaaatttttattatgattattattaaagttattgtttattttgggtttgttgaagtttggtttagtgccattattattatcattcgtattattggaattatatctcatatttgaaatattattgttattgttataattattattattacccatattattattacccatattattattaggtttattataataattattattttgattcccaaatccagtatttttgttatttagattcttgtttgaaaaacgattatttcctctggagttcctatcgaaatttacttggggttggacttgttttccctgaaagtagttgactttggaaaaatttcctccattattattgttattcatgactctttccaaaaccaaaccttttcaccaaacagcctgcctaataatgcagattgcagttgaattgtaaatagtaggtataccctataaaaccatcaaatctgggtaagaattcatgatgataatccaacatgtcttcaaattttgtgccctatctaaaatgtagacgcgaccatacaattacataatattttaacgttacattacagaattaagcattattaccttaaaacataagcctagcacaggaaattggtatatagcattaacctcattatacagaaccacggtagttaattaaattgagaacgtaaaaagtaacatcaacaatcaaaagcttgaactttcttctgtaaagagagaaaagtgattcaaaaactcccaaaccccagtttatactccacttagcattaatcttggaattgtttatcaaatcatcattatatacagtattggcacaataatttgccataatgacaaaagttctttcttgacctaatggattttgtaaagattcatccaaatgcctaactaaatcgttagttttaagaataagtaacactattcttggaactgttgctagtaaactcattaaactcagaaccattccatcactcatcattgcatctttcattttctccatttcctcattagttctcttaccttccaaatcaccagacagtgcatgatcaaaatctctaccagtgattgcggctgcaaataatgggaaatgttcatcatcaatctttgcaaattttttaccataaatcttcatttcattttgctttttatcaataagagctaaccaaaatttagcataatcaaccttcatctggttaggtatggttctataaagaccgtgatcatataatacaatttcaaagttgtgtccattttttggcttatctaaatatctgattgcaatattaccatgatgtgggtcacaatgaacaaaacctgattgaaaaatcatattattgaaaatatgcgccaaacaaccacaaacttcagatctagaaatatgatgtccatctatatattttagatcatccagtcttgcaccaccaataaattccataatcaagattcttggtaatgctttataaacatctggtattcttaaggcagtagactttaaataatctttgaaatagttttttgttttttctgcattttttgcttcgtatgtaaagtttaattcaacaaatatcgaatcttgcatttcatcacctagccaagttaatggatactcagggaaaactttatacatcatatcaaacacaaattttgttaatgcaacatctaaggggacaaatttcgccaatgatggatgttgtaatttaactgcaatttcttggtcaccttcagttaatactgctttatgaacttgtgcaagagatgctacaccaataggttttggatcaaaacttttaaaatattcattaaatttttcacctgtatcatgttcaaacatttcaatcaattcttctaatgtagattccggacattcactttgaagacaaatcatagtctcagtccactcgagaggtaataagtatgttaatgctgaaatatgctgtcctaatttaatatagatcccaccattttttcttaaagcagccagtgttatatctgcagctttttgatgagttgtacttagctccttcaaatattcggattcatccacatatttggagttcaatgtccataagtataaaccaaaacaacgggtcatcgcaatagtgacaacgccgactctttcggcaattagaaatgtatcaatagtattctgtctgaagtttggacttacaatcaaaccaccaacaaatgcagttatagctaaaccacctataagatgaccagtcataggtttcttactaccatcatccttttcattactatctttgtgataaattctagtagagtatctccttacaatacttgattgactattgtaagcttgaatatttttccttgccagacttactatggttttactactatattgaaatcttgcagctaagctaagttgattataacaaagatgttttagactagatcccaacatacttggtatgagccgtggattggtacttaaatatctgtgtaagtatagaaactgtagaaaaatatattgaaaaccaatcgccgatacacaacgtttctcaatcacaaattttgattattcatgttaatattgggggccattgggatatacagcttttctttatcagcaatttttataaaactatagacatcaacaagtatctatgaatatctaagagtttttttatcaaaactctatgagtctaactaccgatctttgattacacgaatggaatgtgttattgattaaattaaagttatgtaactacagaaatccttgagttaagaaagcaaaaaacactaaaagcaagtattagttaaacatatcgtagattgtttgatcaatgaataatcctgcatacttctcagggtcttcagtatatggggaagttttttcattttgattggtagaactttcaaatggtaatactgttctactatctacgtttggcgtcccattcatggaatcaaaagctgacattgacttttctttatttagttcatttgacataaaaacatctctccaaaacacatcctcttgactaagagtagaaaagacatccatcgattgttgattaatatgaatatcattagttaatgaatgattatcataagaatcggaagtataggatggactattttcatctgctggaacattctgatggagtttttctctcaaaattttaaagctatttgattctttactaccatatctataattatcacatgtagttagtttgacaagattaatagcatccgattcatttatagattcaacaaaattttttaaacacagcattggtaagaatatgaattttttatccctgataagactaataatgaatgcatgtgccttcaacaacttccatgagtagaaatttttattagccaaacttttcaaacttggtaaatattccagaccagattctttgatctgtttacaaaatctatggagaattttaattttagcttcatgatctgagttttctatgttcttattttcatatttttcaatgtaaagcaaaacacaaatataaggtgagagatagaacacccatcctttatgcaacgatggtaaaatcacttcagcaattgcactctcaaaccccattccaaaatattgtgaacatttgcaggacataaattcgaaattcgaaataatgtacatccataaaacaattcccttttgtatacaaaataatgcaccttcagcgtttgagtttttttggaaatagagatagagattatgataaatacatgttaggaatcctgaaatttgaacataaattgaaaaatcccaaaattttgcagtctgttgttcaatggtatcaatcttcatgcctaaaatgtcctttaaattaccaaaattttcttctaactgtttttctattttccataatttactaagaataacttgaacttttgatttacatttgagattacaaacataacttgttaattcatttgccaaagtattgaatttatactgtagtttgatcttctcaattattatcttttcaatttcaaaatttttgttattggaagatgattcatcaaaatatggtaaatgagtatcaaaaaaatcataatcaacaaccttattagtaccaaataaaatgtattgttgtgtatctaaagccagtaatctataccaaatttttctccacagatgtccaattctacccttactgattaaaacgtcaaaatgttcaggatctctgttaagaccgatatttatacccatttgaacaaggattgaaatgaaaatatgtgaatcattattgctaccgtcagctaaaccatcaacgttttcatattctttggttaataaagccaattgaaatacaggtaaagcacacctattcaataatttgaacaatgataaacatttttgagaaactgctggtatttcactatctagaggatttctaagtaaaagctcctcttctgaacttctttctattttttctggatttgaagagtaactcgccagagataattcagaaagcttcaatactagtaacattgtaccaagtgttgcaaaatttaatctattattaatatttagtttctcaaacttttcatcagaatttatgtcggttgcttgatcggtgtgaagtaaaatttgaacttcatttgtgaaaatatgttcatcaacatatggatgtataggatatgatctttcaaagaatcttttgatatataaccataaaatctttttactaggtaaaacttttaaaatgtctttcattaattccggaatattacacttttgtgttttagtaaacactttgaaattcaaatcagtttcttcaacaaaataaggatttaattctggattgtgcatattgacattcaaaggtataatatcatcgacccctaagtgtttgaaaaacctatcctcataatgattttcagtttcgttggtagccttgaataaactctcctttttttgtttaataatttgatctctaattgggcgtatcatcggatcctttaagatactagatagccaagataatggccccagattacttattctagcaaaattgtacaacattggaacaaacccatcgtggaaactcatcgaatcatttgagtctatgtttaagtatttgaagattttagcctcttctaacgatatgttattacctcttttttcagagatattatccatattttcattaggggtttcatttcctatattaacagaaccacgtgtacctataatgccagcatttttaatattgctggtaaaactaccttcaagcgttggccttcccatactatcaaacatattggtcatttttgaaagtctttctgcattcagaggctgcaaaaagttctcgtctttaatggatttaatagattcacagttatcatcttttaacttctgaagaatatttttaattgagtcaacatttttaatttcaactcctttgacttccgataaatcaacaggtaaagaatccaatggaggcagattatgaggtaagccatatttcccagtactaggtggtgggagtggtaaatttggattaatcaaagcatgtatatttctgattgagtcatttgcaggtgtaccagcagatgttgataatctacctaaattattcaatttgtacagtttatcaacagtaggagatgtaccttgagtttcagctcgactcatctcttcataaatccaatttctatttttgaagtatggatttttgtcaagggaaggtaatttaatattagtttgcatattaagtgcagcattattaatatttacagatggtgttttctgagattcaacatttgaatacgttgttttctctccattaatataagcccatgatggatcactataaacacataactcaacatatttacccttgacacaacagccacaatagggtctttgtcgatcacactattattaaaaatataagttagtattcattatttcacataaaaagtaattttttttccaaaacttacctttgttttacgtttacgacacatcgaacatgataatgtcattctgtttctctttgatttagtctttttagttttgtcatcggactcagtaattccggtggaattagttttattatttttcacaatgttgtcatttgaattatctttacttttagaagataaatcagacgctttccttttcaccattttgccaaactcttgtaaatctaccaaaaagagatgtagctaataaagaaagaaaaagaataaacgatgtcaaaagaagctatttttcttccaatgtaaattcaatgtaaatgcaatagaaatcgaaacaaccacaactccaacgggtttttagtcttttttttacatccgctttcttttcggagtttagataaaccccaataaaagaaaaagaaaaagaaaaagaaaattttttatttcggataattacgtaactaaaacctattcctacttctttttttattttattaaaaatttataaaagttcattattttatctatgtacaattatatcgtatgtagtatacttacagtattacaggaagttccaattatttagtgctgaatctccatcgggagtagctttatttgtttttctattgatgtttgaattttgtggattctctaatcccaattcaaaattgtaaactaaattatcaactggagtattcaaatcaacatttgtgaaatcaatttcattcaaggaattgtacatttcaccatttgtaatctcattattaacttgattttggaaaagagtattgaataacatattatttgttttgttattagttgaatccagttcaactaatttattcatgccatttcccatcaggttggattttctattattgttagaaacattattcattaggaacatattattattattagtattttgattgttataattatctgaactcagtccacgattaaccccaactatattatttgaaagagctccagcacctaatccaccaatatcatgtaagaaatcatcatcaaaaatttctggtaatgaatcaactatactatcaccagtcttattatcaatcttagttggatcattagctaaagaggtattccacatattattatttgatgtagtaattggcaagaatgagttgtccaaattagttggaattgaatttgataaattctccattaatctattaacttctagactttcatttatttgattttggatttggaattgatttgtagcattttgagctgccatattcatttgtagattcatttgcatatcagaatttagttctaaattattaaaactttcattaatttcataattctggattggttgtaaattcatcactggattatcaattatatcagaattacttataattggattaaaattaatttctctactatgattttgtgtaaaatcagtaactggcggtagtttagaagtaccgaatgcaatttcaaacgcagattttaattcattatcatgcttgactattggctcagtcttcataacagtatctggtgttgtatcagttgaatttaccttactaactggagttttgactttacttctagtattagctttcggtggactagtcttaccatttgcagagccaatcttcttgaaatttaatttgaagattttttgagaatttgttaaaatattatagaaaaatttaactaatcttttcaaaacccaagcgtaataataatttttagtcaatatttctaatctttcaataaaagtttccaagtaagtaaataatcttttctgtaattcagttgaatcaattttgttttttttcaagatttcaataacaattggggagttttgttgaattcttaaaattaatgaaattaaaaactcatgtgatctatgattgagaatcattaaatatggataaaccattaattcagttgcataattaggaaatgaatctttacatgtatccataaattgaataaagaatttgaagttttcaattgataaaaggaatgaggattcaaaaaatgtttcaatatatttatgttgctttttgatcttttcaacagaattctttttttgacctaataatttactcaatttttgttcatggttaacaaataataaataattcaacgtaaatatcatattcttaacaatcaaatgaacttttaatctcataatttttatttgttttgaatactttttaatccaaactgatgaattttttgcactaaagggattgacaatttccccttcacccataatcaagtcaattgaaaagccatgttttgaggtttcagaaaccaaatcatttaatttgtcaataacagccttaatatcattaatcttaggaggtgcatcaacaacaaacaataatttcatccctttatatatccatttatagaaaacaattgagtctttgaaattttgaacaatacacaattctctttgtaataatttattactttcaaatattttctccaaaataccttgttcaataccaccaggtagtctacaatcccaagttttattgattgaattacccaaagttggatctaaatcaagttcaaccggtaaacctttagtataatcacccatacttaaattagcttcaattgtaatgaataagagtccataccataattttctccaaagatgtcttttcctgaatagttttgatattgttaatttatcatcatttgcatttgaataaaaatttttaaaattaagtggatccctatttaatccaattgtatatgccagctgaacaagatttgaaatataacttgaagaattcatattaagtatttcattagagtcaggacttttagagtttgaagaatttgcatcagtttgcttggttgatgaattattattttttgtatgtgagtcatctgtatcaaatccatcctctggtgataatgtagcatatattttaagatacagaccaacttggaaaataataattgatggttttgataataatttcagatttgcaaagatttccttgacaagatcaattaaaacaaatgaaatgaaattttcaggtttcattaataataactcgttttgtgataaaccatcaatagcagtttctggaagtgataaccaacttaatctaattatgattaaaagaagacaaagattcaagaactcatcagaatattgtgttgtaatcaagttcaatttaattttattattattgaaagtgaaagctgaattaaaattagattcgttaattgcatcagaagtgtaattagtattatttataattgaataaattttatttttaaatgaaatctcatcgacatatggcatattgatatataatttatcaaaaaaacgatcaactaaaagtccaacaattttcttgtttggtagatattgttcaataatagatagaacttgtttcgtattattataatttatagatttaattgttattggggatattgacttcagtctctttggagtatttgaaccttcaggtgtatcaacagttcgcttattactattctgtcttgaacttaatgaatcgggtttcattgcaattggcacaaaattatttaatttatctgaatacattggattaatttctgataatggagtcgaaggagctgatggaataattggtattttccttttagatgaagaagaagacggtgatcctgccggagaggagtatgaacttctaattgaactgatattcatcttcgacagtttttctttgaataaaagttttggatcatttgtcataagtggtgatatttttgatgaatttgaaacatctagtatattacttccattatccatatctaccgaatcatttgctattgttttacgtgaatttatacttgtagaatttggttctgattttgagcttatagttggagttttcagttttgatttacgttcttttttcaatggtgaagattgaggtctcgtattagctatagttgaaacattattacctattggacaaactccaataacaccagtaactggacataaattatgagatttcagttttacatcattcttttttgtatctaaaatttcaatttcattagaatcggagtttaggttaggtgttttgatatttatattgttcgtgttatttgtattgtgtaatttcaaagagttttcaaggaattttttcaatttacttgtatgttcagaagttttatcattaggtattatcgaagttaaagagcttatcttatatttattattataatttttataatgagacaacatatttttatctaatgaatttttactattataataatattcatattgatgtctcaattttaaaatcttcaaccaaagatcattaaggtacaaatcatttttaacaatgaacatccaagagaagacacttatttgataagttatgggtatattgtaatggatatttttattagcaatgaataatatatttgaattgaaaatgacatctagtaattcatcatcattaattgatgaggttgaagataaaggatttaatgtcgaagaaatagtagtgactgttgaagttgatatattatttgatgttttttttttcgatttaatttgatcctttaattgtgaattttcagtttcaagttgttttagtttagcattaagtttttcaaacttatcagaaatttctttctctctttccttttctctctgtctttgcttttctaattccttttctattttcttatcattagcggcactattagtaatattggatttaatgttcttatcatcattaaattgattaaaatttttatcatttaattcatcattttgaggtggaggagttgaaggatgagcccatttaggttcaagataatgacaaagatgttgaacattattctttatacaattttgacattgaggctttttgtttatcacatttgacttttctccgacgacaaatgacacatgaaatgggcaccctattacgtttgcggggttgcttttccatttttaatagagtatagatcagtatataataaaatacaaatttgatctaatgaaaactgaatggaatcaaggtgaaataattttttttacaaaaagatttcaagtagtctatactataatattactattatctgttagtaaagtaataataacggttagtaatgatttgacagaaacagtttaataaatcaaagcagggtttaaaataaaataaaaaaagtttaatacacaaaaattactattattatctgactccaaaacaacaacataatattaataacaaaaaggcctataatagagagatagtggaaaaaagaagccaaattcggtgatatcggataatgattttataattcactaattctcttctgcaccgccgcaaacctttccaccaactgcgccaccacatctggtaatggtttactgcgccattcgggtcctaaggagtggcgcagtttctggaaataagtctttaaatcattaccatcccattgactaggggatgatgaagatgtacatgatgaagaggaagaagtttcgtttttgatgctatgtgttctctcctcagctagtcgatcccaatcaatattattctcattatcattttcatttaatctttcatgtaatttattaactaaccatttttgagtttcatcatccatattccttaattttgctaatgatatagctctttgaattttattccatttatatcgacattgtatacgtgatcttgatccattcatcttttcactaacaagtgtccaattaatattatctccttcacttaaaactgcattttttaataaattttcctcttcactcgtccatctacttgtttgtctatttttaccacattttgcataattacgccaacgatctctacaatcttctggcattctacctaatgttgcaccaattaatttccacttagctccatgttcctcagctaaagatgataattgtttctcttcctctaatgtccaaactccccgtttctcaaatacatgatatgtacgcctaacatgtttatagagtgaagctctacctctatgtggtaaaactaattgtataccttcccaaaatccatccttacgtctttcattaccccaaattctttgaacaaattgttccctcgttaatccttctaatttttcatattcaataacaaatgtttcaattgccaaactttctttatcactaaatgctctccccccaacaatcttcttactactcttttcattttcatctttttgttcatcttctaaaccttgtcttgcagttaatgctgcaagtaagattttctcccttctcttctcttttactcttctctctttcagataatgtatgatttctcgttatattcgttgaattatttatattgatattaatattactattgttatgatttttttgccattgtacggcggcaacagctctgacagcctcatccgctgcatcgttaacagctgccacaagtctagcttcttcaacatgtacatcaacatcaacattaacatcatcatgtatattgttatcattatggccattatcgttaacttcatgaacactatctatattggatagtacaggatcaacggactcttcaacagttttcttttcattttttatattatcatgatgaacattgttattgttacttatactattattggtattattattgattgtatcttcgttattagtaacgtttgtagtattacctacatcattattaacaatattatggttatttccagtatcattaacattactctcatgttcaatttcattatcattatcattatcattatcattatcattttcatttaagaatcttgatgtccattgctggaattctaatcttgagatttcttcatcttctttattcttaacatcttgactgatattaaacttaatgtcctgtgaattaactttctctgcattgactaatttttccacttccattaagtcaatatctacatcaacatctacatccacatctacatctacatccacatcgacatcacatccacgtcaacatcgacatcatcaacgttcacgttaacaacattattaacaacattagcagctatttcctgaatatcgtaactagtttcttcctcttccatgttggagcaataatttaatatttaaccccttatcttatctactaaaataatcaaatccgggtaaaacatgtatagtaaataaacaggcaatagcaaaaataataagcattcaaaaaatttacctaataatgagcacataataaatcatccttagtaataataaagaaaatttatcacctatttaacattgggcatttttactaagcgacatttttcatgtcgtgttgtagttacatactgaaaatttgattaatttgatgttcaatttaaattttacataagttttaattaattataaaatccaaacagtttttaataaagtaagtaaatttatattagtttaataatgatgtttaaatatcataattagaatttatcaaaaccttttgaacctgctgctgaagtaacctttaaaacattaaatctaacagtctttgataatggtctacattgaccaacggtaacattatcaccttcttgaactctgaaagctggagaaacgtgagctgctaaattcttatgtctcttttcatatctgttatattttggaatgtaatgtaaatattctcttctgataataatagttctgtgcattttagttgaaacaacgacaccagataaaatcttacctctgatggaaacatcaccaacgaatggacattttttatcaatataagtaccttcaatagcagaagctggggttttgaaacctaaaccaacatctttataccatctcttggttcttctagttgccttagcctttggattggtgaagatatgtggttgcttttggaaagctttttcagattgaacggttaattcagtagtcatgtttactctgataatatactgctgagatttgaaattaaaataattaaattaaatcaaattaaattagttgaaaattttagtacatttaaaaaagtttcaattgtaaatgattgtaatgatattatcaccaatatttctcacccactctattctctctcagatttgaaaaatttgaaatttacccttttcgctatactatcaaattaaaacagtcacatttttttcccacttttacaaatttctcacatttttcacgcttttcttaacttttcaaaagagacgcactgaaaaatgaattattatttcagtaatttttacttattaaaatagaaaaaaactacacagacctcgcacagcgcacgtgctaaaaaaagcttgagagggtttttaaagggggctcaactttatatactatttataataaaaatgctaatttttcaccattttcaataccaattttactaattaaagcttcattatctaaaaatttcatatcactaaattcaaatcctggtacaacaatctcactgacccataaataatcctttgatgaaatttcttcaccttcaattggcataatataacatcctttataagtaccaggttcaacaatccattgtgttttttcacctttctctaaatcaaatccaacaataaattcttcaatttcaccattctccttaattaaaatatatttacctctaccaccttgtaaaatatgaatggttgttgatttttgatttgtatgaaatttaccaattgatgattcacatgtcattataaaattaatcgctgtagttaatttatgatcttcaattaccttttcactacgatatgtctctttaaagaatccaccatttggatgtttctcaagatttaaatcatttgctaacttaatgattgattcatcgggtttcgtgatgtcgttatcaacgtatttaggttcactgaatgtcatgatcaagtattgcccctagtaagaaattagaataattataaaatataaaaggaacttcacatttagcatgcatcagcgcgtacaacttctaatattacagtttctattattattgtattcaatttaaacctcagtgttaataaaataacggaattttatataaaaaatgacctaccccagtaaatacataaatacaatataaaatacaaatataaataaattaaagaacatgttccttttcaaaaaaattgatttaatttggagtcaatttcttcatttgagcaccacctaatgaccaagcatggaataaatcaactaattcattattatcatgtaatgctaaaatatcatctgctccacctctacttttaccaccaacaatgaaatttggtacagtaaatctacctgtttgttcaccaacatgattttgtaattctttaccattttcatgattatcaagttcaattataattggctctggtgtaatatgatattcagtttttaataaatgttttaattttttagagaatggacaatatgatttagaaaatataacaactggtgatttatctaggatcttttgatattcgtgttttgggttaaatgatgatccattatcttcacttggtccattattttcagcattttcttgtgcttccataacttgtttatttaatctattaacactatttttagtatttgaagttttctttgaattaatttcattatcatggatttccttttgatcattcgatccgagaatcttatctgccttaataccattagtgacatcatcatcatcttcaactactttatctttattgttatatccaacatccatcttgttattagcattgactttaatatcagcattatcggaattagctttgacattagacttagctttagccctttccttagtgttagcattaacagataatggatcccctgcaactaatgggattttcttctttaagttcttactttcaacattctttactttactctcatcaattataccttctttacctgtaaccatttcattagcgttaataacttgagcatcggttttttgagattttgatttaacctttctagtattatcatttaatgatgtaccatcaatatccatgcccttagtaatatcaggtataacaatgttattatttttagttttcagggtattatttgttgaaatgaaaaggaaaaaaagaatgaatacagctgcagatgcagtaagtaacatctttctctttcttgcagtgatagagatacccatattgtatgatattcagttaatttgtgaagtaataaaaagaaaacagaaagaaaacagacagagatcagggagtcatttttaaatttcttattgtttcgtgcctttcggtttcgctctttggggtaatgaaattgaaatcaggatattaaaatattatgtaatgttaacatatcagatctccagatttgtttataatattagcctttaaatagttttatataatgtataaataatatagtaataatgatagtaattgtactagtaacaaccacataatatttttaatctgttataatctcagcatataacattctctttaaatcaattaattctaattgttccttaaattcatcaaagaagaaaaaatcatttggtatactttcagcatttatctcagtcgattgatcacgaaactcataaacataattatgttcaagacaatcttcaattgtcattctctttgcaggattaaatgttaaagttttttcaataaaatcaattgctaatggatctgcatttcggaaaattttcttcattggtatcttacgctgattcttggtatgtgctctaatgtaatcttttgctctctgtaatttaatacattccatatcctcctcatttggagatcctaatacttcaaatattaataataattgatgacgataatctttaccagggaaaattggttcccttagaatcatttcagctaaaatacatccaattgaccaaatatcaattgcttttgaatattgtgctaatgataacataatttcaggtgctctataccatctagttgcaacatattctgttaaaaaagtatttttatcctttgttatatcagtttcaaatctagctaatccaaaatcacaaatttttaaatcacatttttcattaactaataaatttgcaggttttaaatctctatgaattatatcacaactatgtaaatatttaacaccttttaataattgatataacatataaaccatatgattattacttaattgatgagttctaataactgtatgtaagtctgcatccatatattcttgaattaaatatacatcattgaaattttcaaagcttgtaggtttttgaatatctaaaattttgattatatttggatgattaaaatgttttaaaaatttaacttcccttaaagttcttaagcaaaataaatcacgttcaaatggttcaatctttttaattgcaacaatttcttcactattatatttatggccaacagcgacaactccataagctccctgtcctataacactaattactttataatctctaatattaaatacgtaatcttgtttttgcatagttattgatgtaaccttcgttgattaaaaaagataaaagaaatttttcataaatccaaacatatttcaataatcatatatatacaacttagctaccatttatattatataaatcacacatttcaacgatacactgccaaagaagcatattgctattgttactactccgtaaattaataaaaaatcgtttttctgtttcacatttgcaacatgaaacatcgtttaaaatttttttggaaatttctgattcacgtgatcttatacgaagtttttcaattttatacgagattgagttctatttccatcatcatgacttttttaatagtttatatgataacacgtttctctggacaatggaacaaatgaatcatataactgcactcatcactggtacatctggtaatttgggaactgcaattgctaaaagacttattaaggaagtcccacatgataaaaaattaaccattattgtcacttcacgtacgttagctaaagcaaatgaaacaattaaacaattagttgattataacaataacgaagttaaaagatcaggtattttagattttgattattcattattagattttactgatatggtatcaattttatcatctgtttatgaattacagaaaaatcataaatgtgttgatataatctatttaaatgcagctcaaggtgtatatgcaggtattgattggattggtgcaactattgaatgttgctcaaatccaatcaaaggtgttacttatccaacttataaaattcaaaaggttggtgttaaatcaaaggataatttaggtttagtatttcaagcaaatgttttcggtccttattattttattcataaattaattgaatataaattatttgaaaaatctgataatccaagaattatttggattagtagtgttatgtcaaaaccttcatatttatcaatgaatgatttacaattattaaattcaaatgaaagttatgaaggttccaaaagattaattgatttaatccatcttgcaacttacaaagatttattacaaaaacataatgtcaaacagtatttaactcatcctggtatagttacctcattctccttttttcaattcttaaatccaataacttattatggtatgctgtttcttttctatatagctagatttttaggttctccgtggcataatattcatggttggattggtgcaaattcacaaatatttacttctttatatgctgatcctctgaatggtgatatacagtcagttaaatatggcagtgctagtcattggaatggtaaggaatatattaaagttgatgaagttgacgatagtggtaaagctgatgttttgaaatatttcgatgaactaactaatgaatgggatgaaaaattaaaagatcaaatagtaaacactagaactagataaatagagtttttttttatttatttttgaaaaaaaaagttataataaggtacaaaattataatagaaaacaaacgaatagttgaatttaataagcaacaacaaaaaaggaattcattgaagttttagtgacatcaatgatccaacaaatgttaaaattaaccttgctctgacttcattaatatcttctggaactaaccaaattaaagctcctaactttctagcaatagaaatcgctaatcttgcatttgcatatctttcatcttcagtattaccatttgtaactaaatcataatcaacatatcctggttttaatccatgtaaaacatctagtaagaatacactgtttgctaatgatggatctttaaatgatctaatagttgatgctttaccacctttaacaaccatattattagcccatttaagaatatccatatcagaaacttctttaccattgattgataatgaacttaatgtattgtttatatttcttctcattaattgccaaactaaacctaatgttaacatcttattaccatctaaaatatcagatccttcaataccaactaatgaaaatctatttgccttaccaatagcaacacaataattagtattttctaacgctttaaatcttgacatttcattaccatttgtaggtttcttattaatatgtttccagtcaacactacctggcataactttatcatatgcttctaataaaactgtaccatcttttaaatcttcgaaaagtgaaacaacaggtggattaacatccaaggaatttaaccataatgtgaaaactctagcttctctttcaccttctgcatcgaattcttcaatgtcaggcttttcttcttctgctattggatctaatcctggatgtgtgttgaataaatgtgcaacaaacgctaagttcaatttagggattacctgcaactaatgattttggagttaaatattttctacattgtaatttatctgcattcttcaaaactaattctgctctgtctaataaattagtttcttgtaacggagctcttgaacataaatctggagctaattgatttaataaaattgtataattttcaccatctgcaacatcttgtgagaaattgtttactcttctattccagtttgctgcctttaaatgatagttgaaccatcttaataaaatcttctcaggtggtaatcttaagaattgttctaatgtttcatcatcttctaataatctgtataattccggatgtaatttaatatcaattttactcaataatccacgtctaataatttgccaaattaaacctaaaattaaatgttccttaccatcaataatatcttcagaatgaacattaacaacaacacaaccaatagccttagcggagtttaaaacaacattagcattttctaataatttgaaattattcaaaggtttaccatttttagaagtatttaaaactctggtatcaatagtatcaggaactgaatcattaattaatgctgataaaactaaaccgtcagtacattcatcaaataattgaaaattatctaaatcaaatggtaatctattaccaactaattgatcaccaactaaaactgaattgatatgtcttgtaaattcaatacgttcttcatcatcaattgtatgcattgttctaccagatccaataacaaccttagctttattacgaacaaaagtttcattactatcagaacctgccattgcagctgatgcaatattattatttgatacagaaccagaacttctaacagatgcattagactttaattcctttaattttgcatttaattcaacaaaatcttctaattcaacatgacctgatgcatcaactgaaacatttttcaatgcttctctcacttcatcatatgatgcttttccactcttagagacgctatcaataacttctttcttatctgcccatccattttcatcaatatcaatgtttctgaaatcctcaatcagagagaataactcagattggtctaatattggatattttttctattaaaaaccgtgattaatgttagtaatcttatcaattgtgcaatgtggtgaaagtttacatacctgtagctttatgacattcattgtagatgccgtgttaactaatcatcaaaaagaacaataattgactaattgaatccattgccaccttaactaatggatcttcaaaattaaaggtttcgctctcataagaaacaagcccccttcataaattgaaatgtaaaacacaaaagagatcaacttctattatacttaacaatctatatttatctttcattcggatattaaaacattacttttacaaaccaacttacaaaattatataacaacaatacaattatccattgaaatgaatcaaacattacacctcggtgtttaatataaactgtgaatcatcctgcaatagatctttaacacgcttacgtaacaaaacactaacagagttctctaatgctgtagttctcttgttgagttgcttgttacgtctcatgatatgtgatatactcttcaaagtatcctcatcaaccaattgtcggctttgtttcaaaccctcccgatattcacgttgcatttgaactaaattggaatcaaattcatcatccatcgattcccacaattcaatttcctccatttctaaacttttaagaaattcacttgtattttggaaactctttgacagtttactagattgcagtttgttaattttaagttcgtcgggggatatctgtccttaatttatttttcataatatacagtcgtttttccacaggtgtttttggaagttcagatcctttcagatctgtatcttgataattgtcattacgaaatttgtatcccaacaaagcccttgcttcatcatcggatatcccaggtatctgtaatataatctccttgtccacatggttaacactgtttttcttttttgaaacaaattcttcatctttagtattgttttccagcttaaattttgaaaaatattgttttgtcatcatctctgattgctcaaatgctttaactttagaaaaccttaatgggtggttggtactaaaagttttataatcgtactcattcatatcactcacagtttcatggttcagaatcacactattactcttgttcataaatgacatatcagtagatagtgatgtttctgttgaaggtgattcgttacctactccggaaatagttccacttttaggcatttgatgtctttcagaatgattactgtaaagtgtaccgtcactactcttcttacttttgatacttattccagctcgtatttttgcattagaaccatgttgatttgtactaggagaagttgaatcgtttgggtcaaaatatgaacgtttcttagagggtgctttctttaagctctctaaatatgaaaaacttgtattattgtagttggtaacttcacttccttgagttacgggaagagaggtggcatggttagcttgtttagagttttgtaccttagagtggtgttgtacatccatgttcatgtcttgttgattgagtgtatgtgtatgtgaatgagtctgtttttgtgtctgtgttttggcagctgttggtccaatatctgtatgagttgctaaactgattttccgttccataccagctgaaacatcatgagagtcaacatcaacagtatcatcatcattatcctcaacattcatgtcaaccctgtcagtgtgattgtaatgtgagatacgggatgtaatagctcgaaacattttccttttcccctctaacttcggtctagaggtagacatatcttctatcagccaatgtttgagctcaaacgaatcagattatagtgtaaaaaacaggaagaaaaacaagtaacaaagaaagaagaagccaatgttagtaggggattaggaaaacatcataataattttttcttatcaaatttcatgttgcccatcttcatgacttaaatctgtaacagttcttttatcttaacattactaaagagttaaatatgatttatacacaatatataatacaaaaaagtcattaaatgtgtctaaccatacacatacaaccacatccactaggacattggtccattttatcctcttcccaccaaataactgcacatctatcatgcattatatggttacagtttgtacagactgatagtcttttagtaacagcaagatcacaataagtacatttgtttttatcatggaactttttccatacttctctaggagtatcatcctcttctatcctacaatcatcacaccatccaatatcaccacaatgttcttgaaaatcggattttttgttttcgttttcatcagttgaatttgtgttatagttaaacttcaaaatcttgatcctatttgtaggtaacccccaataaaacaatatagatgcatactccgcacggtattctttcaaattattaatattgacgaatgatgcaatattggtacaatattgactctcgtaaagatctagctctaatgtatttttcatttcaatattgactacaggcatttgctctgataacattctatcatacattctcattggcgtttttggtctagaaatagttgaaacagttcttgttaattttggaggaatgtaaacattgttgattgtattggtttgttgattaaatgcattactgttttgtagtgatagttgattataacccacatttcgaatttgagctcagtgtcaaatttacaccactgtttaagctactagtaagcattgttttccttatccaagtttccattaaactcagcaaagtttgatcctttatgtttaatacctcgacgattgtgtgatttgttattattgctcaaattattatttatcatatcaccagcaggtgatgagcttttgaaacttctattgtcatattcatatgaagataaagtactaattgatggcattctatgttgcagaacattactactcaaactggctggcataagtgtagaattcagcttattgaaagaaacagtactttggtttcttatcaattgtgaacctatactaccaaaagcacctctactcattgaactgttcttctgactggaagttatactggggttttttcgtaaaattgacttttgtccttcaatttgagttttgctgctgttgtaaggagagttaatcggaacatgggtatgatctctaataacatcattttcaaacaaaatacacgataacattgcaagcatctgtatattatttactttttggaaatattcaaaaatattctttactaaccacacactaccaaatgggtgatacccccaataaaatctatagttacgaaccaagtttggatcatttatctcattaccaattttatccagcatatccattgtggtttctgcatctaatttgacatctttcattagaatatatgacaaaatcttccaacaattactaattgtagtataaccatatttctctgcaactattgaattgtgttctgctaataaatatggatcatcacccaaaaccctatactcatacgctaattccatcttaataggtatcaagtttctaaagtcatatatcttgacaacatttttggatttgtgactcttagaagtatttgtaacatgcgatctttcagttggtgcagacattggattacttctagcatttgaagaatactgtttggaatcaatattattaacattcatatttctcaataagtttgaaactttagttctataaagtctatcagtttgaaacatctcaaaatcatttgacaaactatcatcagattgctcagaatcagagtcgtcataaccggataagtttccatcgattacattatttttggataattgtaaaccgctggacaccggctttctcttcaaacttcgtactaaactaaaaccttgttgtccaaattttattggttgttcagtatctgtttctcttgatataaaaaagcaaactaaatgcccacttgaagtccatattgctccacaacccttcgaaacaggtgtactatcaaatggtgcccttttcaagttattttgtgcaataattacacgatttgttttgtcatcttctaattccaaatctacatcatcttcttcctctccatcatcatcctcttcacagttcttttctttatcatcattactgatcgtactctcaagatcagaaacatctaccaacatattatttttatcatctctatattctaaatcatagggatctatactttcttcaagttcaagatccaaatccaccttctctcctaacaaaaatctcaagcaaggctctagacagaatctcttatttgaacaaaacttattggcaatctcttctaattgctttataatttcttcccttttctcaccatttagctcatgtgtttcttcaatcttgaatataggaactgcactgacagatggatatcctttgggaaagttgaactctactcgcataaatattaaatcatcattattttcagaggaccatggtccattaagtgacaaaactaaaacacccgtagaaacggaaattctttcaaatctgagtttggggaatttctggcctatattactgaattcttcacccaaatttaatggttgactactattatcaccatagttgatactatttggatcattgtcaccattttgaaaaactgattgaccaaatctaatacctgagatccagttcagatggttaaaatcactatcagatctggagctatcgtcacttctatggacaggcaaaaacagtgacttttttcttattattaatttgttttcaccagtaatctcaggttctggcctatatgatttatattcaaattcaggaagtttgacaccagcaggtaatggctcatttcttttgtaatcaaatatttcgtacatttcatcatttagtggccatagtcttaaatctttatcagatccccaagtaactagttgatattcactgtcatttatatcagaatttggcgtatgtcgagttctccaaacaaaatctttgaccgttccatgatgacctttaaatttatatgatgcgtttaaccctgattcaccaaccttatctttataattaaccatataaattgaattatcaccgcctcttagtggcataataccacatatgtgatcaccaaaaggtacatgcctagcctttgaaacaggaaaatctgtccgtatcgtatacacaggcttttcatattctttatcaaatgaccagaacttcacggacatatcattagaggaggatatcaattcatatttgttttctctactccaatctaaaccattaatcttggcatcatgtccttttatatttttcattggaattgcaccctttcttctatcccaaatttttatggtattatcatgagaggaagctataatgttaggatccttgtagttccatttaacttgagatgcagcagatttccaatcagaccattgttgaaccggttctttaggacaacgtaaatcccaagcacagacaaaagaatcaactgaacaagttgctaacatttctggattttgtggatgaaaatgtatatctgtaatagctctactatgtgaatgtaatacatactcaattgcatcattggaaggtctggctaaattccaaaccattgctttttgattagatgttgaaacaacccaagacggttttgaacgatgtggagaccattgaacatctgcaacttcccatgaagtttcatgacgcaaccatctaggagccgcaaatggatcatccatatcaattaccaacaatcctttacgtccagctaaaacagcatcttttccacaaggtgaaattgacatgatggacatgtaattactgtccactcgtaaagataacggattttcaaatgttatcgagtcataaggcgatttaatcctggacatttcttgatatgttggtttgtgctttatgaataacagataacgtttgtagggcctatataagctaaaggccagaagcaggttgtgtccatgttttgggtaacatgaattttgtttttttggtgatttatgtaatttcctaattaggtaataataaaaatttctagacaaataattgaatattttaaagtcagcaagtctattttatgcaaataaaaatcaatatatagaatatatattataaaggtaaacttttagataacttctgtaattttgctaggtatattaggatacgtttggtgtgctaatctagaaatttcctaacggatcagatatttttctttcatgtattcataccatttaaccagattcggatattcttagatgatatacccaccagtggttccagtgaagtaaatgaacaatgtaaataagtaaaaatctgcaattgttgtataatcagttgcaacgtaagatctttcataatgtgcattctttacatattgtaactgctttctcaaagctgctagattcttcaacttctcatcttcatttttggaaaaaaatatgtgatcaacccagaattcaataatattttggtttatcaagaatatatctagaatttatctctagttgtttttccaatatacaaatcgtcttttaagattttcaatatgtattcgacaataaaaataaattttttgagtctggatgtatcagattataagtatgctgaaattcttcccaatcgaaatccaagttcaaaatctttaacctcttcaaaaattgacttcaacatctagttctagatatttgatcaatataccaaaccagtatgatcttgcaaatcttttatgaatttaaggtgttcttaatttcatcactataaaaaatattctctttgttgagggagaactgatcaatgtaaaaagaagttagaatcagtatctatatatggtgtaaacgatcaggaaatatattgaagatttaacacggatatagatatttcttatttctgttatgttatgctaaattaagaacaaacattctttaattatgaaagcggaagcagcatgtcatttgttagaactgggtcgtatagttcaccattactttatccatactatatgagaaaagagaggaactgtcattgaatagagtggagttaataaaatcaaaaatttagagttaacaaatttgaaaaatgtttttttttcagaataaaacttttaatttgtttacaacttcttcctttctacaaaccatttttctaatggaaacaaccattaaaacaaacagaagaccagcaagatgccaattggatccgtcaaaagtttatgaaaacagtaaacctgaacagtcaggacaaagttttaatatatggtacagtaaatggactggaggtgaaacaaacggaagagcagctatatcacatgctaaacatcgttgcaatgttaaaagggatagtggatataccaaggcggataggtatactgaagaaggacagattaatagaactaactatttttgtttgtattttgcaaggggatattgttccaatggtaaaaattgtgaatacttacatagaataccgacagaacttgattttttctctccaacagtagattgttttggtagagaaagatttaatgattacagagatgatatgtcaggcatcggttcattttcaagagtgaataaaacattatatgttggaaagatatcgaacatgaaagatattgaggttcgactgcagaagagttttggagagtttggagagatagcacatatcaatacacaagtcaagagtaatgtggcgtttattacatataaactcgaaagtcaagcacagtttgcaaaagaagcaatgcattgccaaagtattaatcccgacgataatactgaagttttgaatattagatgggctcacgaagatccaaatatgaattcaaagaagagaaaacatgaagatcaaaatgaattatctatggatgctgctaaaaaaatattgatgcatttaaagaaagagcaagagaacaagaaacagaagatcgtatctaaaagtatctccaataatgataatgacaatgataacaagaacgataacaatgatctgaaaaaacaagaaaagatgatttttgagttatacaagaaaatgaaagccaatgatgaaatttgtggtcttgttagtggttacagtactagtgatgatgaaagctgaagtaaatttgaaaggttgctgaattaaaaagttattacgtctatacatctacttcatgtttctatgtttctaagagagtctgcatttacgatgtttttcaaatcatcgggacatttactaatcggactttttgaaattatggcctttagatcagaaagaacatcaacatcagtactagaattccaaaaagtaatagcctgtaccataattaccacctctaccagttctaccaattctgtgaatatattcggaaatggattttgacatctggtaattaataactaaagagacaccggcaatatcaatacctctagctgcaacatccgttgcaatcagaatatcacattgttttgttttgattttcataattgcatcctctctttgttgttgagtcttggaaccatgcataacgataggattgaatcctttattcactaaaaactctgctaatgtatcacacattttttgataattgacaaatattataataggaggtgtataattgtataacagttttcctagtatatccatttttttcttatcatcttcgggaacttgaattggttcctgtctcacagtttcgactgcattatttacattaccaatagttactttgacaggatcaatcatatattgatttaccattttattgacactaggtggcattgtagctgtaaacatcatagttgttctttttgggtttttaattgcaaatggattggtatgaccttcaggaagttgattgattaaatccaaaaattgtttttcaaatcccatatctatcattctatcagcttcatcggcaattaaataaaagcatcgacttaactcaagtatattttctttcaaaatgtcaagcaatctacctggtgtcccaaccaaaatttctacacccttttctagtttttcaatgttagattcatatgtgtgtccaccaactatagatgcaacattgaactgtagtgcttttgcaaatttctgaaattgcaattctatttgttgggccaattctcttgttggaacgacaatcaatacgtatggactttcactaggtccaactgggggaagaccagaaatatatgaaattgccggtattaaaaatgctaatgtcttaccagaaccagtttctgcaatacctaaaacatcattaccatccatagctaatggaattgttgctctttgaattggagttggttcattgtaatgaagaattcgtagttgatcccgtatttttggtaaaatagatgtctcgccccatgatctaattaacttagaagtattctttccttttattgaaatatcaaaatcttctttcataattctccaatctctctcgttcatcttgtctaaaggtttttcactccaatgtaaactatttacgttcagttcatcacctaactttctctttctatatggcacgtcaaagagatcatctttttgagactttttaggattgatgaactcataatatgaatcgttggatgtgtcttcagattcatcccaatcaaatctgaactttctatttgaatatggtttaactgtgttctttggttccttttgtggtacttcttcaataaaagtctgtatcttttgttctatttttttacttggcttcaccaattccttcaatttggaatccttttcctgttctagcttttctctttgtgattttgtaagaaatctagctttcgttaccttggatgcatttgaaacttgcgttccttgctttttcaatttcaaaagctcttctaaactaagtggtgcatcatgagctggcatctcaaataccccttaggtataatgtaatatataaatgtacttgcagaaagaattgtctagtaagttttcggtcaactttgtgtcattattttagatctttaggcattcacacttcaaaaatgattacgtaaagatatcttaagtttatgcatgcattattattaagtggaattatacagaaaagagtaagttataaagaggattaacgacgtatttttctattaccgtgaaattgtttgacttgacggatagattctgcagatgctctatctactgaatcatgtaaagcaagaatttcacttttgtttggagtttcctttggaagtttcatattgataactttttcaattcttaaaattaattctaaatcatattgagtaacaagtgaaatagatttacctgatctaccagctctagcagttctaccaacacgatgaatatatgcctttgaatctgttggaatatcataatttataactagatcaacagatggaatatctaaacctcttgcctgcaacatcagttgcaactaaaatgtttttatctcctgatttgaacttgtttaatgctcctaatctttgtgcttgtgaaagttgaccatgtaatggaattgcagagaatccaagaatccttcctaataatgagatattttgagcatgtgcacatgttctagtgaaaatgataacagatttcccgacattttcatttagtatatgaacaaggtatgtgtttttgaaaccatcaggaacaaccattaatgtttgaattaatgtttcaactgttgaatatttattattaacagcaactttcactggattatgtaaagaagctctttgtaacttatcaattttagatgttaatgtagcagagaataaatacgttgttctctttcttggaataatttgtaaaattttatcaagaacaggaccaaattctagttctaataatctatcagcttcatccataaccaaaaatttcaatgctcttaatgaaaaacctttagtattttccaaatgatccattaatctacccggtgtagcaacaataacatgaggtttacgcatcaattctctagcttgttccatcatatccataccaccaacaatagttgtacatcttaaacccatatttgaacctaaagcatcaaaagtttctctaatttgataagctaattctcttgtaggtgctaaaacacatgcaaaataaggtgtttgtgcttcccataaagcttgtaaaataggaattgcaaatgctgcagttttacctgaaccagtttgtgctataccaataatatctctaccttctaatgctggtcctaatgattgtgcttgaattggtgttggtttatcaaaattaagttgtgttatggcatctaaaatatcctccttcaatccaaaatctttgaaggatttctttaaatttgcttcctcttcatcattgttttcagtttcttcagtttcttccttttcttcatgatcttttgattcagagtctgattcggaatctgattctggtttcaagacatgtttttcttccttgtttttatttgaagcagctaactttttcttcaaatcatttatatatttttggtttattttcttttgtgctttactgacttttcctgacattgttgcttaccttggtttatgaaaggttcccttactaatagaagctgttattttaatctgtaactgaaaaaaattttagaaaatttcacaatgcgaatttatttttttgaggcaggtgaaaaattaaatttatttaaaatttttttactgatttctttaaatttctacttgcttacagcttgttcattgtaaaaatcaaattatctcaataggaacacatagtcacaatgggtagaagaagagtacgtactaaagaaatttcactgatgaacttcaaccattgaataaatactaacattttattttataatacagcaaaagaagagaactcacgtcaagaaatccgaagaggaattgaaaaatattccaagatcaatggttatccatctagggacagcattagagaatcacaccctttccaaacttgttagagatacaagaaacatgatgcaaccacatacagctattcgtttacgtgaaagaaaatcaaataaattaaaggatttcgttgttatggcaggtccattaggtattacatatttaatggtcttttctcaaaatgaaaagactggatcaacacatttaagaatgtgctctatgccaagaggtccaactatcagttttaaaattttagaatattcactttgtaaagatgttgttagtatacagagaactccaaaatctataagtgcttcatcacatgaatttttaaatccaccattacttgtgcttaatggtttcacaaatccaaaagatgcatctccagaagagaagcttgttgttacaatgttccaaaatatgtttccaccaatttccccaataaatacaaaagtcggcacaattcaacgtgtgcttttattaaataaagataaagaaactggtttaattgaacttagacattatgttattgatacaaaattagtggatgtctctaaaaatgttaagaaacttatcaatattaagagtcatttaaataaaaaattaccaaacttatcaaaaacaaaggatgtagcagatattattttagatccatatgcacaagcaggatttacttcagattcagaagttgaagaagatgccgttgttgaagttagagaaattgatgactcaaaacctttaactaaacctgtacaaaccgcggcaaagaccggagatgatttagatgatgaagaaatggatcaagatgaagatataactaaacaaacagagcaaaattcaataaagagaaagaaggctgttaaacttacagaaattggaccaagattaaaattacagttaattaaaattgaagatggtgtctgtaacggtaaagttctataccattctcaattctccaagacaaaatctgagatgaataaattagaacaacaacatgctgttagaaagaaggaaaaggaaaatagaagaaaagcacaagcagctaatgttgctaagaaaaacgaaaagaaactcttaaagaaacaaagaagagaagaaagaaagaaagcaggagaagatgttggtgaaagttcagattcatcctctgatgatgatgttgatatggaagattattctgatgttgatatgtcaggttcagaagaagatgctgatgaaaaattatttgatgatgatgaatagttggataaatctttttattgagtattctttgttcatatcaagtaaattaaataaatgtgtaccgtgtaatacaaaaaatataaaatcagtaaatttagagtatggcttataacttaattatcaaatttatacacttatatagcataaaaataataacaaaaatcaaattgaaacctaacttcaatagattagctatacaatgttttatcaaataaacatcaaggacaatgattcaattatcataaaatcaaattcaaacaaaaacaaactgagtaagattgaataaaaagtaagacgaaagtaagaaaaagaaaaaaaatgggaatataattttgaatttgaacttatatcaaactattattttccactctagcatttctacgttccgctgaagaccatttatcaacattaaaaacagtgtaatcaccaatgctgaaaccttcaggatgtaaaactgctgaggtagaaaacaaccaatttcgtcctgatttttcttgtttccaacctttttcagttaatagttgatgagcaacatttctttcctcaattgatcttccataatagtatccaaagaataatgattcataatcaagttctgatacactttttctcaaatcttttgaaatttttattctattccaagattctgcaagatgaatagccttcaatcctactggatacgtattatttggagtgtaattaatagattggaatggatcataaaagctatttgatttgtttttactagatgatattgaaataataaatgattgaataccaggtggtaaaaatctaaaaccatcagtagcagcaccgagttcatgagacttatcagttacatcatttgcagataaaacaaaagattcaggtgcagattgtgtattgggtattcctatatcattgtcagttggaggcaattgagctgggaagttaatagatgttaaaccagtagaagcacttgaaattgttttattttgtatcactgggtttgatgagtccgatgatgatggggcagtatctggttgtatataagatgttgctggagcagaattttcttcagatattcctgattcctgttgtaatttatttgataatgaattgacgttattatcaatttgagtgtcagttaagtcttttggtttttgtttctttaattcttccaatacacttacagcgttcaaagcatttgaattaaccgctggtttatcagctggtacagattctttcttcttagctgttacaatacttgaccacttaagttctgatgtttgtggaactggtgcaggctttaatgtggtcaaagtcgtttgattgtttgaagatgttcctatagattgtatcacaggtgatatatctatagaatcatttttagtaattgcactaattgaagaaggagtagaaacatttgactgcgatattccgtgattttgtttaacatgagctgaacttgatcttgaatttgaattggtagtactatcaactgaagtttgatgaccaattgaacgagacctttgggaagtttcaggtattggagaagcttcaggtactggagagtttgaagattcttcaggaataacatgaatgtcattgattaaagcttgatcagcatcaagatctagttcatcataaatagtatcatcaaacataaaatcgggacttctgttttcatcaagataatatgtgatatcttcacttatgttcataacatcatcaactgataatatttcattttgcaataatcttagaacaatttccaatttttcagtatgccaatgatgatctttaagtaattcttcaaattcttttttctgttcttcattatgtacatttttcttacctttttttgaaggttgtaacttttcaatttcagcttcaacactttctatctgttgttgtaaactatctaaggattgtttaacaaattcaatagcttcattatcgatcgttggagtatcaacagcagctaaactttgatcagagtatgctttggttttacttcctttttctaccactttatacttttccatagcaatttcaactaaacgacgatgttcaagtaattgatctttatccttaatttcatttgcagcttgccaatttttaacttgttctctaaatcgctgtaatttcttgatttctttctttaaatcattttcaagtttatccttttgtgaaccacttgcattttcatgtctttcatatagtgtatcaaaaatttctagaccttcaagaatttttttaaagactttgtccatctccctattttgaaaataaaaagtttatatgaatgaatatatagtattcatttatagtttatgttagtatgtactcaaaatcatgagcgatcatccataactgggattatttcttgaaattatcatcttcgagagggcacatttaccataccactctcaagttagaaaattgacagaaacaatcaccgtatgtttgaagccttatttggaaaaaaaaagaatatacttactgttggagtttcctctgtcctgacatattgataggtaggtgtttgttgtatgggtttgttgttttgcaaaaaagtgttaattgaaatgaaatagtgaaaaaggattcgttgaaatttaattaattgactgttccgtaattttgacgaaattggtcaaaaaaatgttcacttaacttctcgtaagcaggaaattttttttttggacattttgaagttcagttgatggattgaatttcttctttaggagtttaaagtatggagaatggtagtaggttatctgtcgagtattgatattgattatatacatcttaatttatacaaaataattttacaattaatcatttgctaccctactttaaaactgagattctgtaacaaatatgcagttttgaagtcctgtagaattttgactgctttgatctttaccttggataggttttggaatagtgtattgtaaaagtttacctgaagaagttacaacataacatgttctatcaacaataccaattttcaccagttcatttctcttacttgataatttaatacaagaaaaatctcttaatggttctactaaagaattaatagtatctggtaaatactgtttatacctattccaaagtaatgaagatatttgccttgcttttgaatgacttttatcaaaagatttttgggccttatttgatgtattatctgctctatcaattaaatttcgaacttcctctaattcatcggttgttaatgttgaagctttagggaattcagaatgttgtgaattatcaattgaatcatcagattgtgttgatgaatacatcatatcaacatctgaatcatttgatactcctaattcagctatattattaggaattgagaaaaaatgtattgtacctttatttgatgaacatccaaggattgtattatcattattaaatgacattgattgtattcgtgcaggtaatgaacctcttctaaattctaatatctttttacttgtccttgtattaaatattctaacaagagtacctttaattgatgcagttgctaaaagaacgccattattggataatgcacacactgctaatgcatttttatgacaatttataattgaaataggttgcattttaatagtatcaaatacaatcatgcttcctgtttgatgtttggatttattatcattattgttacgtgaataaactgttgatacatcactatcatcattaaactcatcattacttctagaaacatcaattcccatttctccttcttcatcatcttcaccatattcatcttcttcatctgaaaatccatgtgatttactaggtatttgttgatatgctaaagctgaagaatttgaggcagataatgcacatattaagctttcatcatttgaattagtattattattattattattattattattattttatcattatcttttgatttattatttgttaagatgttaatcctttgtattagtttcatacaagaaacatcataaataagtatatgagttaaaaaaaccacaattaatcttcttctattcattcttacatctaagattgtatttttataattcaactcacaaatacaagtatttttacgagtgtttatgattcttaaagtattgttaatattcaatgggccaacagttgcaactaatgatgttgcaaataacatttcagcaaatgaaattgtaccttcattaatatctgatgtgtaacaattatcaaagggatcacaattatatactgctaattcaccagttttagaagttgctaataaacatgaatgcgtttgattaaagcgtaaactacatttttgtgtcatgatatttcgttgattgtaaaattagggaaagaaattggtatacataagaaaagataatacacaacagaattgcaaattacattattgataaggtcgatgccatgttaaatttacatacagtttcccaattaggaaatgttgttaagctttctacatgatatttaaacatgttcaagtaatgattatattaatagcacgtatatgctactatttgccataagtttgagatacaactggttgtattataattacataatgtacacgatataaatatagtcaaagtattgttttatgttaattttttttttagattcaaattcaatttctaagtaaagtaaagtaaagtaaagatcaccattgataatatcatataagttcaatattaataactgaattacctcttatcacacattgtcctaattgtacaaactcattctctccacgtactgatgtaacttcaaggcaattacttattgtcaaatttaagaaaaaatcgtaacctgatagtttaccctgcactactctatttccattaagttctattcttatatctttatcgagatacttcttaagttcaggaacagataccatttgaatatgcactagatgttatacaatggaactcaaagaagaaaagactgtaacagtaaaaggtgtaaaacttctagaaaattccattactcggttaccaaataaaatttaaagacccgtagattttccattttgatcccaacattggggttttctttaatgtcttctctgttacgtctttaaacacacaaaagcaatggaaaacactcgtagtaaagtattctttgatatttcaattggtggtaaaactgctggtagagttgtatttgaattatttgatgatataactcctaaaactactgaaaattttaaacaattatgtttaaagacaccaggttataaagattcaatttttcatagagttattaaagattttatgattcaaggtggtgattatgaaaattttaatggtacaggtggtagttcaatttatggtgaaaaatttgatgatgaaaatttcgaattaaaacatgatgaaccatttttattatcaatggccaatgcaggtccaaatactaatggatcacaatttttcgttacaactgttaaaacaccacatttagatggtaaacatgttgtatttggtaaagttatatcaggtaaatcagttattaggaaagttgaaagaacagagacaggagaatctgacagaccattaaaggaatgtaaagtaattaattgtggtatattaaacgaaggtgatccattagtaattgatgatggaactggtgataaatatgaagatattataagtgatgaaccaagtgttgatattaataaaccggaaactgtatttgaagcagttaataatattaagaatattggtactgaatgttttaaacaaggtaaattagaattagcattagataaatatatcaaggcgcaaagttatatggcagattataatccatatgatttaacagatgaagatgttgcaacatattggaaattacaaatttcatgttatttaaatatgtcattaatgtcattaaaattgaaaaatgcacaagatacaattaaatattctacagaagttttagaatgtgaacaattagatgataaatctaaggcaaaggcatattttagaagaggtagtggacatttaataggacataatgaagaagatgcaattgcagattttgaagaagcacataatttacaacctaccgatgcaggtatttccaaggcattaaatgatgctaaagtttccctaaagaacagaaaggccaaggagaaggcagcattcagcaagttctttaactgattatactgtatagcaatgtaaatagaaatagaaatagagatagaaatagaaaataacgtaatattcaatgtaacataatcggagtaaacatatcccccgccattaaattttaacttttcactctgtatatattttgtataaaacccggagatggcccccaccttttcctgtgaaagtggtctcatggagcatcttctttctttctttttgattagaatatttattatacacaacaatgccttctgaaaaacactggaattacacaactgatattgtacgtacctcaatcaatggagtatgtcttgcaaaccctttccttaaatacattgagagtgaacgtgtcgtttataatagtaacagttcaaatgaaaaagttacaattttatctggtggtgggtcaggtcacgaacctttacatttaggatttgtcggtgatggtttattagatgttgcagtatgtggtaatgtctttgcatccccttctgttaaacaaattgtttcaggtattaattctaaaccttcaaagaaaggtacaattattgttgttaaaaattatactggtgatattttacattttggtttagcatctgaaagagttaaagcttcgggtttaaatgtcgaattattaattgttcaagatgatgtctcagttggtaaaactaaaaatggtatggttggtagaagaggtttagcaggtacaagtttagttcataaaattgttggtgctaaatcaattttagataatcattcagcttcatttgatgaagtttataatttaggtcaaaaagttattgataatttagttacaattggtgcttcattggatagagttacaattcctttatctaaagctaataataatgaaaatgataatgatagtgatagtgatgatgatgaaaaaattgatgaattatcaaaggatgaagttgaaattggtatgggtattcataatgaacatggtattaaaagagtttcaccaattccaactgttgaagatttagctgaatcattacttaaatatttattagacccaaatgataaagagagacattatgttaattttgattctaatgatgacgttgttttattaattaataatcttggtgcaacatctaatttagaattatatgcaattcaatcaattgttgttgaaaaattaaattcagtttataaaattaaaccagttagaatttatactggtagttttacaacttcattagatggaccaggtttttcaattactttattaaatgttaccaaagctggtggtgatgaagttttaagatgtttagatactccaacaactgcaactgcatggaattctgcaattaaaactaaagattgggaaagtttaggtaatcatattattaaagaagttccagaagttcataatattaaatcaaatattaaaattgattcatcattagttgagaaaattttagttaaaggttgtgaagatgttttaaaagttgaaccaaaagttacattatatgatacagttgcaggtgatggagattgtggtgaaacattagcagcaggtgcaaatgatattttaaaagcattgaaggacaaatcattagaattaacagacgcagttaaatttttcgatgaattaggtgatttagttgaaactgcaatgggtggtacatcaggtggattatattcaatttttatttcatcaatgggatcatatttaaagaaaattgatgatgaatataatggtaatttccaacttaatgaaaaggaatttgctaaaactttaaatgcaggtttaaaaggtttacaaaaatatactcgtgcaaaagttggtgatagaacattaatggatacattaattccatttgttgaaacatttgcaaatactaatgatctttcgaaagctgttgaagaaggtcataaaggtgcagagagtacacgtaaattagaggctaaatttggtcgtgcatcatatgttggtgaagaagaattccgtaaatttgatgcagagggtggattaccagatcctggtgcaattggtcttgatgcactcattcaaggttttgtaagtggttataatgcttgatttgttatgtttatgttttgttatttaatgagttgtatacctgtatacttatatactataataacaactggtgatactctctgaatctttactttaactgtagacactcgaattgaaattttgctttttttcttactttatttactatggggaagtttcttttgttgtagtttctctgcctgtttataatactttctctcttaaatgacaagaaattatgaagtggtatattgattctgatcctttcttagcattacgtccatttcctgaaaatccatctaatcaattaattgaacattggcatgagattgtctttttcacaatattctttcatgtaattatgttaattgcaccaattattaattcaaaatattttggtaaattttatgatgatctgaaaaccaatgatccaatgactaaaattaattatgatattagaattgttggtattatacaatcaactatttcagcattagtttgtattccaatgtttgctcatccacaattttgggaaaatccagttagaggttcatatccatttgcaggtttaattgcttcatttataattggttattttatttgggatttaatttattgttgtattggttattatagtattttcggtattgaatatttatttcatgcagctggtgcattattcgttttcggtacaactttaataccattttgtcaaccattcctttgtgcatttttaatttttgaattaagtaccccatttgttcaattacattggatgtttacaagatctccaaaaggtatgtggagtgataaattaattacaattaatggtatattcttaattacttcatttttcttttcaagaattatttggggtgtttatgcaactatttggagttttttcctatgttatccacaaagggaatattatccaatttggttattgcctgttgtttatgtcttaaattcaggtttccaattcttaaattttatgtggttttcaaaaatgattaaattggcaaagagaaccatttctgggggttcttcaaagaaagataaataaagtttataaaagattatgagattagttagatatgtaaactttctagatctagtttattccttcatataatgaaattgttaacttattttacttaaaacatgaaaattagatattgtaatagtgaaaaatttaaattttctgcatattaattttttttcttcacatgttttagagattattaatcactttcattatataccattaaacatactataaagcaatgtcaaaagttggtgtgttaacgttaggacctgcaggtgcaggtaaaacaacattttgtaattctatgatgtcatatatggaatctattggacgtacagctcatttagttaatcttgatccagcagctgaaccaactgaatattcatttagtatagatatacgtgatcttatatcaattagtgatgttcaagaagaattaggattaggtccaaatggtgcattgatttattgttttgaatttttaatggaaaatttagattggcttgatgaacaaattggtgattataataatgattatttaatttttgattgtccaggacaaattgaattatatagtcatgtacctgttgtaccattattagttcaacatttacaacaacaattaggatttagattatgttgtacatatttattagaggcaccattcgttgttgatagaggtaaatttttttcaggtgctttaagtgcaatgtcaacaatgattttccttgaattaccacatataaatattttatcaaaagttgatttaattaaagattcagttggtaaacgagagcttaaaaaattctttaatccagatccaagtttattagaagaaatgaatgatgaggatagaggtgattatgttacaggtaatgaaaaattcaggaggttaaataaagcaattgcacaattagttgatgattttggaatggttcaatttttaccattagattgtagtaataaagacaataataaaaatgttgagttgattttaagtcatattgatgatataactcaatggaatgaatcacaagaaccaaaggaaccaaaggatgaaattgaatttaatgatgatgaagatgaagattaattaatattaatattacattatctaatatacataaataaaacttatattttataaattatacaacagtttctttttttaattcgtttttaataattgtaatatcctttttattatttttctgtgtgaaaggatttagataatcgaacaatttcactaaacctggtattaattgacaatcaccaacaattattaaatcaaaatattcaacataatcaattatactttgtgatggttcatcgatattaatccaaataacataacctttatttgaatgaacaacttttgccatttctttaactaatcttctaacaccaggaattttcaatgttgtacctgtaattattaaacaatcaggtttattctttaaatcattttcagttattgaaccaattatttcaccatctggatgaaattcattataaagtacaattcttggtcttaaaataccattattttgtaatcttttacctgcaatttgtctaattgaattcatttcttcacatgatggacatgatctaattaatttattttcaccaaattttctattttcaaaatattcataatttaaatcacttatataattacatttagaacaattcattaattttatactaccatgaagttgaattgttggtggaattgattttttatccaatgatgattttgattttgatttcgatttaggtgaatctgatgttgacattaatggaattttagttttcaaatttgataattcagtatctaaacaatcaatattttgagtatataatcttaaaagtctattttgtttacttatatcattaatcatatgatgaaatggtgaaggttttgaaattgttgataaatgatataatttttcaatcattttctcaaatttttcaattgaatcattatttctgaaaacattataatcaaataaatttttacctgaaccagttgattttgttgataaaccttgaaataatccattacttgatctaaaatcaggtatacctgaattaactgaaatacctgcacctgtaattacaacagtttttttagcaaatattaatgaataatgtaaaaagtataaatcttctaattcaatttgttcattaagtgaataattgaaatttatattatttaaattcaaaacagtacatggaggtggacgaaattttaattttggtttccttgtaaattcatattttggtaattcatttgaaagtttgagtgtgtgtaataagttatttaaagtattcagattatatttcattgcttcattagatagttttgtatatgggaaagaatcttcagttgatggtgatcttgataagcttggtgatggtgatggtgtgggatggtgatgatgattcaattttgattatgtctaatgaattttcatcttctaatttaatgactattttttcatcaattggttctttttttatcctacttgtcctttccctcttaactttagttactctaccactcattatgtctttaaataaagaataataagttcataagataaagaatgtgatgtaataaaattaagattttatggtttatgggtggagttgagaatttattttcagtttttgcagttttcttgtgtaattaacccaaaatggaaatgtaattgaattccattgaaacgcgtcctaaaagggtaattttaatgtttatattttctgttgtctgggggtattgagagtgatatccaatgttttatgtatgtattggtgtgtctgtgcactctagtagtattgtatagctattaaaattcctgtatttaacactttgaaaaaaataagtattgtattagtatgttaaatttttcaaattttcaaaaacattatagcccttttgttaaaaaaatattagatatctacaaaatgctctagtagttaacacatttaatgcttcatacaatactttgacaggcatatatgcagcaaataaatacaaatactcattgtacaatccctataaaggtaataaattcatattttgaaaagatacggtcacgtgacctcaattttaaaaactcaaatatttaaaaaattagaaaggatgttccttcggggacatatggtcaaacgaaaaaatacagagaagattagcatggcccctgcataaggatgacacgctttacaaagagatcttactcaactttttttttaaatgtgtgtagtatagtatatgctatgtaagtgatatccaatgtgttaattgtacaatatacactaatacagagcagtattaaggataacatactcataacactcaacagaatcaacacaagttcgaatcttgtatagtaaaattttaaataatcggcacgtgcggtattaccaatttgagtaattaaattagatcaagtaaagattttataaaacagaggctaagtgtcaaaagatggatgaaaaatttattcaatacttttcttcttgtagtataaacaatgacaccaattaaaggacagttccctgagagacctccaactttagctgaagctttatatcaaggtaaagaaattggtaataaacctgaaaatgctgatgaaattttaaataaattaggtatttcatcaaatgatagtagtaataataataatagtaataataataataataataataataataaatcaaaagaaattgttaatactgacaaaaaaataacacgtcaaccagttattcaaaagaattcatttattgattcaccaattcctcaagaaactgaaactaaaattgatgcaaaatatattttacctgaacaatgtgaaggtgtaattaatttacaaatggattatatttttatacgtaaatccaagatgattaattatattttaagatcaagagtttttcacatcattattatttggtataatttcaatgatttcatattatcaagttggtgattatttcactgattatacattcagtaaaggttattgggaaggtattaaaaaattatttatgaatagttattttactgatgatttatttaaattagtttttctgattttaatcataattgcatcatcatttacattacttcgatacattacatcatttttacaagaagaaggtaaatcagttccaaataatttaaataaatatttcccagttgatttaaaagaatatgcagctttaacaaatattgaaaaaaattttaataaattaaataaaaatgataaagaaattgttaaaaatattaaagatttaacatattcaatagtttatagagatacaccagttgcatttttatcattaaagagagatggtaaaaatattgaaattattggttatggagttagaagagtttatattaaggcagaacttttaaaagatttactttcaatgtttttcaaagatcatgtaattaatgaaaagaaagtaggtgaaattgagaaaattactgttaaagtttataattttgagaaagaagatattaatttattcaagagagcaggattttataaaattaaaggtgaaaatataggttttattacatcaacaattttcggtgttacattagatacttatgaatttgatattgattctattgaattttaatttaatataaatataccgatatatctatacatattaggagctatataacagtttttttataaatttagtaaggaaagagaacatttttttaatattgagaagtaacttcattatgattttgatcaagtggaatttgatcaagataaccagattcaacacaataaactaaaccatataattgaacttcacctctttcatgatattctttaaaatatttattatttttaacacaattaattgaatttaaaacatttaattgaactaatcttttacatctctcatctatatcatcaatttttaataattcatccatatgattatttttaacatttttaactctttcaagccattgatcaagatatgttatttctttatcagaagaaggttcatcctttgcatgaccgtgatcatgatcatgaccatgattactattatcctttaatgaagcccaaataccaccacaatcagtatgaccacaaacaataatttttttaacttttaaaacagttatagcaaattgtaaagcagacattgaagaaacatcttctttattcattacatttgcaatatttcttaaagtgaaaacttcaccaggtaaacaacctaaagcagtacattcagagacacgactatcagaacaaccaatccaaagagtatgaggagtttgacccttagcagataatgacataatttgaggatgagctaatttaagtgcatcaacatgagatttatttgatctaagatattcacccattgaagattgttttgttaaagtaaatggattatcttttttagaagatgaagttgaagataaataagcagcattttgtggaattgttgcaggtatatttgaaggtgatgatgatgatgacattttagttattgaagatagtaaattttttcttttaaatacgaaagatatgattgctagtttttaattgattgagtaattaaaagtaacatattgaaatgattcagaatgatcataatcatggtaaattcattactttattttcaaatgtgggatcggagttgctctttatataacccaataagcatatattaaatgaaaaaaactcaatgaatcatccagaaagaaaaaactccacttgatgtcaacgcgggacatttgacgtcacttcttgcttttacgtaatatattcaccaagcactatcaaaggcagcgaataattcattaagcttattaaagtccatttcaattatatcttcaacttgaacatcaggtaaatttggcatgtttgataatgataatgatgttgttgatggtataggtaattgacttttatcttcatctattttattaacaatatctctagatattaaacaactattacttgataaattaagtaaatctttgaaaattttatgaattctattatcattattatttattttaataccttcactaacacttgcaatcattaataatgaaatatgtggttctctataattttttaaaaatgattcaactccattacttaattcaattaattgtaaattattcattttattacctaaaatcatataataataataaatatgaatcatttgtggtggatttaatgatttaacctttatattttctttatcccattttaaatcattatttaaattattcctccaattttcaattaattttaaatcattattatatttaattatatcaattaatttaataattgcccttaatggtgaactaatatctaatataccaccaaaattaaattcttcaataccttctaaatctggtacacaatcactttcattaattaaactatcatttctttgtaacatacaaactctacccgttatatgacttataaaatgatcaatcatataacacccccaataaactcttctcctaaataatttattaatttcttcatctctatcatcaaatagagtattattattattattactttcctctctatttaatccaattgcaatacattcccttaatccacgaccaatgttactccaactattctcaatattaccattatgaatatcaaataatcccaacaataataaactttgaaccattggtatattaattttaccattaatccttttataactttccatataatattctttacattctttactttcaattccatcactatataatttccctaatgcacaaactgcataaattaatgatttactacaataatctccataacctttaaaaaaatctactaaaaaagtttctcttgttaggaaaacatgtaaatcaggatacatccatttgaaaaatgttttcattgaattaataatatcttcattatctcttaaattaatccaattattattatcaatatcatctgtattaagatctctctctcttttctttctcatatcccataaaaataccattaccattaccataacaatatttacttacagataattttttatcctctaattctttaatcttttgctttaaatctaatacaattttacttgaaactcttaatgttctaccatcattaccaataatacaattaacattgtgtttaatacacaagttacaatctatttgtccatccttacgaacacattttactttacgttgtctgcatcttatacatgctttcattggcatgtttccaatcctatataatctatctcttcacttttccaaccctatatattccagtactctaatattataaccgttgaagattcatgtagacaatcaaagataaacaaactaaaccccaaagacgcgacgaccccgattgttttctttttgccaaattccctttacttgtttctttttctcagtggcagtggcaggcagtggcagtcgtccaattttccctctttgttgatttttgatcgtttccttgattataatctatatcttacggtgttgcttatttgatctttgaatagtctttgatctttcctttttacaacagtttcattgctatatatatgtcaaatagaacacctcattctccaattcctgttcaaatgacatcaaataataatggtcacgcagctgctgcagctgctattgctgcttcaaatactgcttcaaataattatatgagtaatactaatatatcaaatattcctcaatattcaaataataatcttaatttaaataataatagtagtaatataaataattcaaatacaaatcatcaatatcatagtcaatcatcatctcaacaacaaaatcaaccttcaaattcttcaaatcaagttgttggtttacattataaaattggtagtaaaattggtgaaggttcatttggtgttatatttgaaggtacaaatttaattaatggtatacctgttgcaattaaatttgaacctcgtaaaactgatgctcctcaattaaaggatgaatataaaacttataaattattaaatggtgttgaaagtattccaaatgcttattatttcggtcaagaaggtttacataatattttagtaattgatttattaggtccttcattagaagatttatttgattggtgtggaaggaaatttagtgttaaaactgttgttcaaattgctgttcaaatgattacattaattcaaaaagttcatgaaaatgatttaatttatagagatattaaacctgataatttcttaattggtagacaaggtttacctgatgaaaattcaattcatttagttgattttggtatggctaaatattatagagatccaaaaactaaacatcatataccttatagagaaaaaaaatctttatcaggtactgcaagatatatgtcagtgaatactcatttaggtagagaacaatcaagaagggatgatttagaagctttaggtcatgtattcttttatttccttaaaggtcaattaccttggcaaggtttaaaagctccaactaataaacaaaaatatgaaaaaattggtgaaaagaagagaacaactccaattaatgaattatgtaatggtttaccaattcaatttggtagatatttagaaaatgttagaaatttacaatttgatgcagaacctgattatgataaatatcgtcaattattattaagtgttttacctgatataggtgaaactgctgatggtcattatgattggatggatctgaataatggtaaaggttgggatttatcaattaataaaaaaccaaatttacatggttatggtcatccaaatccacctggtgaaaaacgtcaacatcaaaaacgtagtaaacaacaacaacagcacaatagtaataataataatatgaataataataatatgaataatatgaataataataaccttaataataataacctcaataataccaataataatataccacaagttaatcaacaaatttcaaattctcaacctcaacaattacaacaatcaaatggtgtttcaaatattgcaggtcaaagtggaatccctcaataccgttctaatttagatttaattaataataacaataataataataatattaacaataataatgttaataataataatatcagtgattcacaatttaataaagaatcttcaaatattaaaccattacctaatttaccatcacattcttattcaaagcaaaataatgataatgttcatgatcaagcaaagaataaaaatgatgatgatgaaaatgatcaaggttgttttgctaaattaatgtgttgttagaaaaaaaatctattttattattatcctatttattactatatactatttatactatatacttactcctctcattaatctctttcttctcgtattaccatctctttgattcatcaccttcatcccatttattttcaacataacctaataattttttaacattatcaattgttaattgatcacccatatttttaccccaattatcactaattttaattgcattaccacctccacaagattttaatttaaattacaatattcattggacttgaatcaaaatcatttgtaaatgatgtaccaataccaaaactacatccaatattaatattatcacaaaattcctttaatttaatacatttatcaacatttaatgaatcactaaagcaaataattttattatttatattaatttcattataccaatttttaatcattttagcatattcatatggatctccactatcttgtctaacaccaatataccaatttgcaaaaggtttaaaaatttttaaaaatgattttgtaccataagtatcagttaatgctaatccaacattttccttaccaacagtatcagcatattgttcaattgataatttatttgccattaaataaccattataaccattattttgtttagttgataaaattgctccaactcccatcatccattcatgaccaattgtaccaattggattaaaaccatattttttagcaaaataaacatttgaagtacctaaaactaaatcattatgtggcatacctttaataacattctcttgaacttggaaactacgacgacgtcttgtaccaaattcactaaatttacaattattttcaataagttttaaacatttagaatttgataattttgtaattaattcatctgttgatggttgattattaattgtccaattagtatctataaatttaaaataacattcacttacaagtgcaagtactggaatttcatataatgttacaatttcccatttaccatgaactgaaattgtaatatcatataatgtgtcatcttcatcattatcttctgggattaaattgattgtaatttcatcatttggtgttaatttaacagttttcaaccaatttaaatgatcttgagtgaaatatggtagcttttcatgtaagtaatttatttcatcatctgtgaaaacgtaaattggataaattattaatttctttaattaaccaatctattgcaattttagtgaattttttttcaaggtgttctatttgtaagtgtaaattcacaatcaatatttgaataatgtttatgaattgcagcttgcattgttaacttatacaagtcagtgtctaatagtgatacaatcattgatgggtttagttgtttgttcgttatttgataagaaaagagtcatgtataatagtagaagtagactttatattcattgatcgcgttttgatgttgtcttggttacttattatcaacaactctttctttctttaactagacatggacgaactgtttgatgtggcctacatttgcattgagtgaagaggatataactttactcaatgacaaggtgaaggagttaaagagttcggcttgatgatgagtattatattgaagaagaagatggagaagaagaggaagatgatgaaaaagtacacgatgtaccgccaatacatcaggaggaagaatctcaagaagaggatttatcacattttgtttatgatccaccaactagttataagaatatcgtattactgtatacaattccaatactactaattgtttcattatacacatggattcattttaatactcctgatacattattgattaatgaacttcaaaatcaaattgaaacactttcttcaaaagtggctcagctggaacatattcaacaaaatattgttaaagaaacaacaactgttgtagtttcttctgaagttaggtctgatattaagacagatgttaagtcagatattgagtttgagttaacttctgcaatagaaataacgacaatcatcataccaccaccaccaccaccacaggttgttcacacatatacaaatattgcacgtcaatgtcgtgtttcacgtcaattaacatcatatcctgtacgtaaatatcgtccacagcataggaaaagcacaatttcacgtatattacatggattcccagatactttacgtagattttattatactggtacatttttaaagacaccatttattgaaccaattgataacattgatttattttcaccaaataatagtcctagtaacgttttacatgatacaggattttggcaatgttataatgatggtaatatttattttacaattgataccccaccaataattatatctgagattggtatttattatggtattagaaatgataatgataatgataatgaacgttggaataaagcaatggttaaagatattgaaattttaattaaacccgttaattcaacaattctttcaattccaaaagttcaaaacattggaccaatcaataacaaacaacgcaatgatccattattacaatcatggatatcacttggttcatttgaataccaaccaagtgacgatatgatgtatcaatcattccactttgataaggatatctcggcggtggtcggtgcgacggcggtggaaggtgttatgttagtcattaagagtaattggggtgatgcttacaccgttttagatactctacgtatctatactgtagtttagttagtgtagtgaagtatacatatattattatataatggatcaatctgatgtttatagggcttttgaatcatttgattttgataaatgtgcaaattatggtccaacacttacagctgtaagagaacaacatgcacaacaattagatgaacgtggagagaaaccaacacctgaagatgatgaacaattaattttacaaactaaggcatatatattttgtacggagactgataatatacttgaattatcagattatgcacaatggaaattacaggaggaagaaagtaaagtaacaaattcatatgaagaagttgttgaaatgatattacaaaacaagccagttcctggtattcaacaaattccaacaacgttacatgatgaatctgaggcatcagagactaaattgtcagcaaggccaaaaccttgggaatcaaaggataattgattgattgatttatacttgattttgattgattttaatcttaattttttatactttttataaaactatgttatgtagttaatatatgatatgatacacttagtaacgttcttcatcgacaatttccttcttttcaagaggattatatttaaggaatttttcaataagatcaacatgagttaaaaccattcttctacaacaataacgatttaattttaatctatcgagtgcatcaccttcactcatatgatcatcctctaaataactaagataagtttcccacttgtcaccaacaaccttaccacatgagaagcatcttactggaataatcattcttgttcttgttaaagaagagtatattagagatacaaatacacctttctcactgtatgagagtaatataactatacactgcatattaaaaaaatttttcaccatgaatttttttttctatttctatttctatttctattctatttggatttctaatggtttacttgattgaatctgtgtttatctctacaggatcttctctatatatcatactggaatgtcatcattaactgcaggaactgtacgtccgcatttatcacttgtttcagaggatgcttctcacgttttagctgttcaaggtcatcatattgcagttttttcagttatatcaggtagaccaattcgtcatttatcacttgatgcaattaatatcccttcaatagttgatatcattgcctctccagctgtttcttctcttgcatatgttcttactattgattctcttcatattgttaattggcttgaaaatgtttcaaatccaataatcgcttcatttaaacttaatgattcatatacctataaaagatttattaaatttcattcaaattcttcaacaaaggtatatttattagcatcatcaataaataatgaacaacaaaattctatttttaatgtcctctcatatgatttagaatcaaatactatattagaaactatttcatcatttactaatatttcatcattttcaatttcaactaatggtattatttttgtttcaaagagaccaaattcttcttcattaattacaattaactatatttcattagattcctttgaatcatatacttttacacattcattacttcattctaaggctaatattactacttgtgcagtttcaaataattcagatgatccaataatagcattagcttattcaactggtttaattgtaacattatttgatattttttcatcatcaattaattcaattcaacctccaactaaatcacttaaatggcatatggatccagtaactgcattatcatttaatcatgattcaacttaccttttctctggtggttcagaaaaagtacttgttttatggaatataattaatgataaacaatcttatttaccaagattaaatggtacaattcaacatatctcaataaattctaataatgttaatttaattaatttaggtttatctgttattgataatgatatggaatatttattattaaattcagttgatttattatcaaaattacaaattacttcaccacattttttctcaggtttaaataataataataatttaattaaaaaatcatttcaaaaagatataaattcttgtattaaaaatttaaagggtaaatataaatataaatttaattttaaatcagattataaattcaatccaatttctaaaaatctttacctttcagctggtagatttttacaaatttatgatccaattcatgatttacaattatctaatattgcagttattccaccatctcaacaatatggtaaagttggtaatgaacataatttatcagatcctttattagttggatttgattttatatcaagttcaaaatcagatattaattggttagttacatgtgatgtacaaattaatggtgaaaaaaatctatcatcagttgttcaatcattaaaattttggaaatttaattcatcaactaataaatcaacttcatcaattgataattatacattaaattatcatattgttgatccaatgatttctaaaatttcgtgtattttacctgcacctgaatcatatttcaagggtgaagcattaattacagcagatattttaggtaatgttaaattatggagaccaaataattcaggtgtttggactttacgtaaatattataaatcaggtattgaaaatgatgtgaaaaaaattgatgataatgtaaataattataatattgaaaatttaaataataataattcaactaaatgtgcttggtctccagataatagtattattgcagttgctagaaatggcaaaattatatttttagatattaacacatttacaccaattgaatttgttaaacctgcaatttcatcatcaaaatttcataaacatgcaaaaattattaatgatgataataatgattcaatttcagaaaattcaattagatatttagatattaatttacaaaataatcaaattatttcaattgatttttcatcaaatggtaaattactctatattcaaacaagaacaaatttcataattttccatatacttaaaaataaaattttacttggtttaacatttaataattcatcattaacattaggattttcacatgcatttactaaattaattaaaaatagcaatgataataccaatattgacgacaatacagatactttattaatagtttgtaaatatttcaataaggaaacatccaatatttcgagtaaaataactacatgggatataacatcacaatcatcaatcaaacgtacaacaaatatcacatatgatggattaataattggagctgaatgggattctacatctaagggatggttatttgcagatattgattcaaatttcgttcatttagataaattatcatcatcatcatcaactaaatcaacattagatgaaaaacttgaattacaacaaactacaaatacttcaatttccaccaatgcaggattattagccaatgcaagattacacaagagtaaacctaaacctactgctatcctcatagatgatgagaagtcaaccttatacaatggtatatttgatacactcattgaccgtctcgacggggtctctatggagacattgtttgataatgttcttcaccttgtataaatgaaatcgcgatgtgtaattattaaccctagtaatactatactctttatcttactgtgtatcttcaattagcatagagtcaatatgtttggtaataaatcatttatgggtaagagagaacgtttagcttatgaacaatcatttgttggtaaatatcaaaaattagtacgaaaaaattcgtttttattctttggattaccaatgatgttatcaattgcattaggttcagtacttttaacaaattttacatcattaagatatgaacgtagagatgaaaaagttcaagaaatgtcagaggatgaagcattaaatatgattaataatcgtaggaaagttgatataaaggatgaatattataaattacaaggtttactggatgaacatgaagattggcaacctaaaagagttgaaagattacctggtgaaagtgataataaatggtaagaatgggttttgtcttcttcaattgtatatagaaaacatataatataacaaatatgtgtaaataattaatgaatcagttttatgaataatagatcttgctatagtaaaaaaattttttttttcactatagaataaattattttaaccttatcttttaagacaaagatggtttcattttcatgtgaagtgtgtaatgatacagttgtaaagagaaaactacaacaacatcaaagatcatgtcgtggttcatattttacttgtattgattgttcaactactttttatggtaatgatcatcaatctcatacaagttgtatcagtgaagctgaaaaatatgaaaaagcattgtacaagggtaagaaaggtaaacaacaacaacaacaacaacagcaaaataaagttaccaaacctgtaaaggaaacaccaatcaagaaagttgaacctgtaaagaaaattgaaacagttaaagaagctaaacccgttgataaaactaaagaatctagtaaatcattagattttggtaaatttatcaacaaaccaacaactctttacaaacttttcaaagaatcaaagaaagaaactaaacttaatgataaatcagaattcttgaaaaatgttaaaatatccaaaaatgatgatggttcattctcattaactctatagatagtatacatgtacaattattgtgctttttataatagacaaacaaaaagaaactcatttcaatgcaatcattatcttttcgtaaaataatttagcagtatgtgatggaaatgataattcttcacacaaataaccaggtaaatgttctttaattttttcattcccatcccatattggacgataaattatatcaattgattcaagttgatctaaatttgttggaattgttaatttataataatgttcacctttattaccacgttgtttaattgtaaagattataaatttttcaccttcatacatttcacaacattttaaacctgttaaaaattcaattaaattaaattttgcatcattttcaactttattatcttcaaaaatcccattattttttaaatcatttaattgatttaaaatttcaccttctctttcatttgctgactcaacaatacttttccatctctcaatttcatcatctttttgccttattattttcttaacttcaattgtatttgcagttaatttagtctttaaatcaacaattctattcttcaatttttcattctcttgaattaatttattaataactttttccctcttcttttccttttcttcaacacttgatttatatttatcataaacatctggtaattttgtattaacttgttttaaaagtgacgttaaattcttataatctgctctttcaaacattcgtccaacttcactcatacttggaaattccttgctttgactccttaattgatcatcaatttgattatcactaaattcttcatcgtcacttgatccactatgattatcatttgaatctaataaactattaacttttaatcttttatcgattatattattatcattcccatcattctccttatcaacagctccattgccccttttaagtgctaccatctttactcaattaagagttcaacatgtaaatatatcaaccaagaacagacctttataaacaatgcaaatcaataaaatttaaataatgcgcagccctgcagtggctggtgaaattgtttggtttctatatagggatttctaatggtagcttgttttatttgggtggtcaagtagtgcatattgtgtattgtttgggggtaaacgtgtaatgacataccctcctatagtagagagcatctttttaaaagatgtatgaatatatgcaaagaattgtaaaatatatacgtacgcaagaacttgaattcaatctaaaactgctacccaatatgttacttttcaaaagatgttctgatatctatatcttttttgaatcatattcaatatattaccaaatcagtatactatccatttactttttaagtaacatattctaacaaataaataaataaaaatctattattatcataaatctatttaaaaaacattttatacatagcaaaatatctaaactactcatcacctctccaccaagcatcagttatatcaccaccctgtgctttaatattaagtataaatcccatagaagcactgatagcagctgcaattgacatttcttttggtacattagaagtataatttggatcatccctatgcattatatctctataaatttcatataaaactttcatccaaaataatgtaagtccaataacaaagaatatcaatggtggtgtttgataaaaagtataataaagcaatgctaaattataaattagtggaatttcaagtataatataatgccataaacttctaattaaatcaaatggagtacctaaaataaaatcaattgctttgtaaagtaaagtattttcattatcatcacttgaacttgtacgcaattcatctaataaccaatcacgatatctatcaacattatgaaatggaggttccattgattgtgaaataatattaagagcttcggttacttgtctatcacgtaaatctctttcattagttgttacaaatctaatattagttggacctacaacacttggacttaaaacatctgccattactgcttgagtatgtaacattgatgattgattaagaagaggtgaagttcttggcatgttacgtatatgtgcatttggtggtattcttgtgctattaatttggttactattattattattatcattatgatgatgatggttttcttgctcattttcatttacagtttcaactacacgtgtatgatgatgattatcagtattataattatcattaccataattgtgattatgactctcctcatgattttgtaaacctctaacatgttcatgcatatcaattgacattattggatcaaatattgaaggtttctttttacttgcacgttgattatttgcaaattcaattacattatctcttatctttgttttattatcaataaataaatcaactatatttgaagttgtctctgtactatatagcaaagatttcaatctatttacagtaccattaataaaagcattattaagaatagattgagaacgtgtaggtgtattgttttctcttaatatacgtggattgagtgtactgttattaatggtattcccaatattattactattatcattaacaattgtaccttctaattgtcttatacgagccaaattaaagggatcagccacggtattagccctaacagagaccggttctgacaatactgaagttggagttcttgctacatgaggcaatgaagcgctatttctacgtccttcactcatcaactgagtatatactatactaatgaatcctttactagattgatgtctactaaacggcagtaaacaaaacaggtagacaaactcttcctttccatttcccttaataattttgagaatttgcaggcgttgattttttttgagtcttgcgttgctttaataatttgacttacactttaatgacgagtttgaacttatttatttctttatagaaaggtaccttttctttaggatagaccatacacatctgtatctacactgcaacaatggctatgagattacatacaaagaatttggcaaaacgtttgcttaaatatatagtgattattgcattcatatcttttgtttacgtgttttggccatatcaacaaattgaaaaattatcagattctttaacattagatgaaaaaaacgattatcttgattcaattttgaatcctccaaagaatgaaatttatgatggtaattctgatcctttaaaggcagattttaatccaaataatgataaatttgatttctcaagtaaaatagatattgaaaaaatgaatagagctttaaataaaatgaaaatgaaacctttaactaatgataaaggtagtactattggtaaagaatcagattctgattttgaaagtcaagtaattgaaaaagttaatgttatacctgatattttatcaaagcaaacttttttaacaagtgatccattatcaggatttttaggttcttttgatataaataaaaatattgaaccttcatgtggtaaaattttatataaaccaacagatgatgaaaaattaattaattattcagaaaaggaattattacttgaagatgatctaattgaaatgcgtaaatggttacttaattcaaaatttgctgaaattgttaaaactgttgatccacattcagctgatggtacttcattatctgatatttctcattggtttaaaagttttagttcaagtgtttggttacctgaggaacaattacatatggttgcatcaactattgtttatgcaccaaatgatgaaaatgttccattagtttcatttttaagattacaactgtttaataatgaatggaaagaaattaaaggtcgtagaattagatattctggtttaactgataaagatattgattctgctttacgtgaatatgctaaatcaaatgaagaaagacatttagagcgtatttcattaagattcccatcaattttaaatattccaattttaggtgatgttaaaccaaagcaaggtaaaactattggtccaacaaaaccttatcttatttataaagatggtgagtatcgttcagaacctgttattgtatttgatatggataataatggagtttctaaaaaatatattgttttaccattaaataaacctgtcggttcagatcttgaacatccacctttaagattcaaaggtttaacaactttagaaaatgatgcatgggtaccattttttgatagtgtacgtattggagattcaaagacatcacaaggtgatattcattttattaattataatttattatcagttttcaaatgttcgttagattctggtagatgtagtaaaattcaacaacaaaatccaacaaagaaagatcaatcaataaatttaataaagggtggttcatcacttttcccattaccacgtcaaattgtccaatcattaactgatggtgaaaaaaatcatagattacaaatttgggcaggtataccaacaattgaaacttcaaatggtttacaatcaattttaatggtattaattaaagatgatggtgttttccgtattgaattactttcaagtccattagagattaatgattttataagtgatatttcatattgggatattgcatcttcaggtggtggtaataattttaatgatcatatgttagtaacaaaaattactgaagacggtcgtgtgaatattgttacattacaaaatattgttaattatattcttggagctattgcacctgatggtaaattacctgcacaaacttataatcaagaattatcatatgatcgtacaagattagttttccaatgtgcaaatgaaatatcaaaatcaagtagttcttttaagaatgatgatgatgttaataattttaaagacaagactactgaagagtggtgatttataggtttgtataataataatataatatactataataatcaattcattaacttacagtaatggacgtatcacggtgaagataataaccattaccaatctcaaagagtctattctccggtacaggcgctccctccaaatgaaaaatttcaatttccctcacacaatttttcacttcaaaaaaaattccattattaaggtattgttcgtaatgactattaacttgaatggatttattgattgatttattgattgatttccattttatatatacattgtttctctttgaatttctctctttcagacaagtaaaaatgctcagacaagctagatcattctcatcatctgcatctcgtgcaactaaatataacaaatattcctcaattcttactgaaccaaaatccaatggtgcatcacaagctatgctttatgcaactggttttaaggaaaatgatttcgttaagggtcaagttggtgttggttcatgttggtggagtggtaatccatgtaacatgcatttaatggatcttaataaagcatgtactgattctgttgaaaaggcaggtcttaaaggtatgcaatttaatacaattggtatctctgatggtatctcaatgggtactacaggtatgagatattctttacaatctcgtgaaattattgctgattcttttgaaactattgttttaggtcaacattatgatgctaatattggtattccaggttgtgataaaaatatgccaggtgttcttatggcttttgcaagacataatagaccttcaattatggtttatggtggtagtattttaccaggttcaggttcatgttctggtgttccaaaaactttagatgttgttagtgctttccaatcttatggtcaatatttatctcatgaaattgatgaaactcaaagatctgatattattaaacatgcttgtccaggtcctggtgcttgtggtggtatgtataccgctaatactttagcttctgctgcggaagttcttggtatgtctcttccatactcctcatcatctccagccgtttctcaagcaaagaaggatgaatgtgctaatgttggtttcgcaatcaaaaacttaattgaaaaggatattagaccaagtgatatcttaactaaatctgcatttgaaaatgccattagatatacaattgctgttggtggttcaactaatgctgtcttacatcttattgcaattgctcataccgctaatattaaattaacaattgatgatttccaaagaatctcagatgatactccattattaggtgatttcaaaccttctggtaagtacgttatggctgatcttccaaaagttggtggtactccagcagttatgaaattcttacttgcaaatggtatgcttgatggttcaactttaactgttactggtagaacaatgaaacaaaacttagatgatcttccaggtttaccagaaaaacaagacattattagagcagtctctaatccaattaaaccaactggtcatttacaaatcttaaaaggttctcttgcacctgaaggttcagttgctaaaattactggtaaagaaggtaccagatttgaaggtaaggctaaatgttatgacgaagaagcagatttcattaaagctcttgaaaatggtgaaattaaaaagggtgaaaaaactgttgtcgttattagatatcaaggtccaaagggtggtccaggtatgccagaaatgttaaaaccatcatctgctttaatgggttatggtcttggtaaagattgtgcattattaactgatggtagattctccggtggttctcatggtttcttaattggtcatattgttccagaagcttatgaaggtggtccaattggtttagttaaagatggcgatgaaattatcattgatgcagataacaatatcattgatgttcttgtttctgaagaagaattagctgaaagacgtaagtcttggaaaaaaccagaattaaaatacaagagaggtactttatacaaatatgctaaacttgtctctgacgcttcaaaaggttgtgttcttgattatgatggaaatgataaataaatgtattatgaaaatacatattaaatcatctgttcattgaatgaataacctatttacattattattctcgctcttctatatagtatatcgacaattgatagtcctggaatggatcttcaatttacatcaaaaatctaaaaaaaattggtaaaaattaaattctttattatttgatcgtataattaaatgtacatgtaaaattcatattagattgtttgagcttcagtttctaatcctaatgaaactataccattccaaacagatccaaaaccataacaaactgctccacctccaactatccaaacgttattatctgtttctattgtactggatccgacaaagactggacttgtagcccaacattcatcatcaatagtaatagagctgatagttttggtcggtatattgatttcaatagcagtgtcaaattgatcatatagtttcatacctacaccaccaataatgataatattgccatttttggtgaatgatttgaatccatatcttgccagtactggatgtaccattataactgttagtaaaacttttttattatctaaatcaacagtgatttcgtataatttgtcattaaaagtgaaactaccgctgtcaaaaatcttaccaccaatcaagtagtatttaccatcgagttcaataatttcagaaccctctagaagaacgttctcatcactaaactgtaattgatatgacaatccatttggtgaataaatttgaaatccttcaccatttgagccaccgtaaattaaaatatcatctccaaatttgacacatgaatgtttaacaagaccggaatccaacgatttttgaacattccattcataaccattactattttcacttaacttccaaacctcatcaataccaattccaggaatacgacgtccaccaattaaatatacagcgttgttcattttgacagattttgcagaaacacgtcctttgaattcctttggtgtagttatttgaatatctttatttaatccatgcgtgtctgataatcttgattggttactaccacaagtgatcagtctatcgtttttgatactaaaacaattatgaaattttctttcaagttcagttggaagttcagttttttcagttttccaattatatccaaatttggaaactggaagaggtttatatagttcagcatatgaagtggagtaaacttcaacaccttcttgattagtggcgtgcaagttaatgtaatgttgtccaaaaaagataaattcttcccattcatcaaatgcttcaacttcatgaactttcttcttaatttcattgggaactaaatcccaacaaccaatcaagtttctagcattaacattttgaaatccaagttttttaaatctattgatttgatcaagtatagttggatatgtatgcacacattgtaaaggtgcttccattttcttgaaatgattaatcattcttttggcaaatggatgatgtccaccagatggcataagttgttcaagaattaagaaatgtgagtttgaaaattcagaagaagtgttaataattgggtttgcagtttcgggtgtcatgtatgctaatgaaacttcagcaatgaaaatatttgttgttgctgaactatttgctgtgaatgactcaagttgttgacagtataattctttatttgttaaatcacaacccattgtagcgtaattttcagttttaataataacaccaggaataccatgattttgaatattttcaccaataagctctttcaactcaggtgccatatttatcatttgtgatttatacccaatcaattctgggaaatcaacatcaatacagtataattttctatctttaaatttttgatcatctaataattgaaatggtaatggatcatacccacatcctagatttattatattgattctttgacctattggttgtgcttcaattatcttttcaatcgccattctgatagatttcatacgaatccaatacccacgattgataacaggtgaacgacgtggtgattttttcacaaaatgttgaaaatatggtttactttcaggttcaactatagggttgtatattatttccactgatctcttagaaacgatagatgaatcattggtaccttgaacaaataaatcatgaacaatcttttttgtctttttatcattttttgaaacttttacattatctcctttttctccctttgctaaaacattttgctttttaccgtgttttccaaactgcttttgagtaacagaggcaaacacatcaatccagttatccatattttactaacttttgctgaacagaaagcagtagagaattgttaaagttgttgaaaaaaatattttttttcaaattatcatgttgatccaaagtgacgtcaaattgcacagcctttaggagcagcaaatctttaatttgttgctgattactgattgctactacaaccaattgatattgacaactatacgattaagagataatcattatatgttctaatgccagtaacaagaagcgaaactccaattagtataattgatgactcatttattgatagtcagacggaatctaatgctcaatcacaaatcaatgaaaatgcaaacataataatacccaaacctaggaaatttgtgttgacaaagtacacgatatattccacaacccaaagaatgtatattgttggaagtaatactagagagacagttttccgtatacttgaaattgattttaccaatagtgaaaaattaacaattatggaagacaatgtgttttttagcagacatgagattatggaagttttgaatggtatagaaaattcaagtgacgaaggattaactaaaagacaaacggtggtgggattattaggatttattaaatttaccaaaggatattatttgatagtagttttgaaacgaagagaggttgcagttttgggatcacatgaaatttatcatattgatcaaactgatttaattccagttgagaataattataaagaacctgaaaaaaattctccagaagagaggtatatacagacatttaagaatatcaatttaaacacaacattttattttagttatagttatgatttaactaactcgctacagacaaatatgatacgaaataaacgacaatcattaaatatgaatggtaatacagaattatcatacgtatttcagtttaatgaacgatttatgtggaacgttgcattgttaaaaccagctttccaaacttttgataaagtctatgattggtttcaaccaataatacacgggtttgttgatcaagttaagaattcagttttccaaaaacatttttacattacaattattgcaagaagatcacatcattttgcaggggcaagatttttcaaacgtggtgctaatgataatggtgatgttgctaatgaagttgaaactgaacaaattgtttcggatatgctaacatcgtcattccatgatccaggtgctggattctataataatccaagatatacttcatttgttcaacacagaggatcaattccattatcatggtcacaggaaacatcaccaaatctacgtatgactaaaccacctattgaactttcagttattgacccatatttttccaaagcggcagcacatttcaatgatcttttcaaaagatatgggcaacctattcagatattaaacttaattaaacaaagagagaaaactccaagagagatgaaattacttgatgcattcaatgaatgtgttgattatcttaatttgtttttacctgaggataaaaaactagattatacagcatgggatatgtcaagagctgcaaaatcacgtagtcaagatgttattagttggcttgagaaatattctgagaattcattatcgaagacggggttttttcataatggtaaatctgtctatgatacgaagttacaacaaggaatttgtagaacaaattgtgtggattgtttagatagaacgaacacagcacaatttgttattggtaaaagagcattaggttatcaattacacgcattaggtataatacgtggtaaatatttagaatatgatagtgatgttacaaacgttttaactgaaatgtttcatgatcatggtgatacaatcgcattacaatatggtggatcacatttagttaatacattacaaacatataggaaaattaatcaatggacatcacattcaagagacatgattgaatcagttaaaagattttatagtaattcatttatggatgcacagagacaagatgcaattaatttattcttgggtaattatgtctattcaccaggtaaggcacaattatgggatatgaacagtgatcattatttacacaatactaaaaaatactttgaattaaatggaacaccatcctatagacattggtttactgatgcatacttaattgattataagaaagatttagtaaaacaatgggaggaaactttaaataacaaatttttagttgatttacaagagagagggttatacataatgaaaattgaaccatatgctggatgttttgaaaattattggaatattaaatatggatcaagattactagtttcattttctaatttatttgaatttcaaatgaattcaactagacaatattctaataatgttgaatctgttaaactatacccatcaacgtctaatacaaaaaccagtaaaaaaacatcaggatttggattattcacattgtttaaaaaacaagatagttctactaatgaagtttctgatactagttcaacatatagtaaaactgcaagtaaaagatttaatagttttagtgaaagattacgtggtaatgcacccaaacatatatttgatcccgaatatgaggaaggtacatatttttcaccatttaaatcaagaaaaccacatagagaattaaaattattgtatggcaagacagagaatgaagatgttataattgatgatgaaattgaagatttaaggaatgatttagaaaaacatttgagtggattatttcaaatagatttagatgatctagataaggaagagtataaatcatatcaaaggcaatataaatcatttcttatcattctttcacaattacaggaatctaaagactttaacaaattttatgatgaattcaaagttacagagaaatatttgaatgattcaggattacccatcattgatagtaatataactaatgaagttttcattaaagattttgaagcacattataataatcaaaataataagaagcccattgaagaaattgaagaaaagaatgaagatactgcgtttatccaggatgacgagtttgaaatgtataaaagtgataatgatgatatagaatattcagaaaaaagcaactcttttgagaacgatgatgtggatgaaagttcacacgacgatacactttcattgattgaactagataattcaaaatcaactaaaaattcattagagcaaatagctaaagaacataatattgcaatacctgaacttgattcagtaacacttgaattttatcaatcatcagtctcgtggacgaaagaaataccagtttacggaatgtcagaattctgtaagaatgataataatttgaataatatcggttatgatgatgatgaaactctatcaagtattgaatcaccatcaccaattgggatggattattataatgaggactatagtttcaatacatttcaagataacaaacaaaattatacaattgttcatcatagggatgaagatgtagttgataaattagttaaagaatatacaaaattatctaaatcatatattgataggaatgatattggtaaatatcagaaacattatactttaatcaatgagatgaaagaatttgataccgataagattaaacttgaagtacctgatatacaaattaatggtaatccgaataaagaatttagtaaagaaatagatgatatacctgaagaaactacatcaatgttaaatgtaactagtggtgattctgagaattattttagttttaaaatgttgaatagaaagtcatccaaacaggtattgcaaaatgataaaaagtaattagtattttttttctttctataattttttaaattgtttaactaatttatcgaaattttcatttatttcagattgtttccaattttcactctctgatataacataaacgcaaaacattgttgattttgaatcatcagattttatccatattttaccattaacaccaattgcaatttcaaattttatcttttcaactaattttgataatattaaagcatttggtgagaataataaaaatcttgaatacgcagttgaaacattaaaacaataaccaccatttaatacaccaaaaccaccatctttaccagtaactgcatctatacaacttaattcagcttcaatatttttttcagcaattgaaactctagcatatattaaatctcttatttgtaatcttggtctatttttctttgaagcatttggaaaagcaaaaatatttaataaaactacacaacttgattcatttaatgaaactttataatattcaccaaattgtccaataattgtaccaattactagatcaccaacttgaggtatataccttccatgagctgaatctatatagaaaagagaagaatttttattagttttctgatttatgaaaatacctgaacttgaaggtaataaagttgattgatcatttgataaaagtatatttggacctaatgttatatctgaattttcaataggttcatttatagtaattgtatcacccggtataacaagattaagggtattagacattgttatgtgtgtgtttgctgttcattctacaagataaatcaaacgtaataaaatattcatgatatactattgaaatttttttcccacagtaaaaataaaatttcaaaaccaacaggtcacgtgcagaggtgaaattttcgtaaattattatgtaatatattgcaatggtttactgagccttcctattatgataattatcagtagttattgttatagttattataccaatacttcttttaacaatgttatcactgtataagtctattgtaatgggtatagttgttatactattgttatagtattcaattagacatgtaaacattattgaataaatacaagacatcttatatgtaccgggatagagataccctttgtagtaatatgatccgatttctacaccatgtcttatgagattactaatactaataatgttgaatttgataaaacggttaacatgttagttaggttagtataaaaaccgttattacagagtattatattatatattatatcgattataatcttaccactttaatcatttagagatatatctcttataaagaaagttaaatatacacaactgtggataccaatttgcagtagataaaaaattattagtaaggaaattttgaattttctctcgtattgaataaataaagtttagttgtccttatttttcgtgagagctgcgatttttccatttttatcgattgatttagtttgattaatatatctccgttttatttccatttttcttctctattttaaatcacaggttattgcttcaacaattcagggctggattagattatgggtttactatcattaggtactccattacattggaatcaaagtaaaaaacatgcagagcatgtaagaaataatggtatttctcaattattgattagtcatgaaatttctaaaaatcgtgataatgataaattttattggggtgatgaaattgaatatataatggttaatataagtgatgaaaataatgatgaaaaatctttaaaattatcaattgatcatgattatgtattggataatttatctgaagatggtaaaaattatcaaaaatctttagataatgaagtcctgtttcatcctgaatatggacgtttcatgcttgaagcaactcctttaaatccttatgatggtacatccatttctgattattttaaagttgaagataatatgcatagaagacgtaaattagcaattgaagaaattgaaaatccaaatgtttaccctttaactttaacaacttatcctttaatgggtgtaaaagatttttgttcaccttcaactgaagttaatggttctgcttcaaaatctttattcttaccagatgaaattattaataaacatgttagatttcctactttaactgctaatattcgtcgtcgtcgtggtcaaaaagttgcaattaatatcccctctatttaaagatataaatactcgttcaatggatgcaattgatgaatcaattccagttcgtgatttattcccttacttctgatagtgaaccatttttaaattctaaaaatccagctgcaaaacctggtcatatttatatggattcaatggggtttggaatgggttcttcttgtttacaagttacaatgcaagctaaaaatatgaatgaagcacgttatttatttgattctttaattaatattgctccttttatgttagcaataactgctgctgcacctgtttttagaggtcatttagctgatcaagatgttagatggaatgttatatcaggtgctgtcgatgatagaactccatttgaaagaaatgaggaaccattattaaatcaccccctatatggtggtcatgaaaataatagtgaaaatgttaaggtaaatatgaaaagaattccaaaatcaagatatgaatcaataagtcaatatttaggtggtaatgaatttttcaaatcaagttataatgatttaaatgctccaataaatgaagaagttttcaatagattaaaatcaaatggatttgatgatgaattatcaagacattttgctcatttatttatacgtgatccattagttttatttagtgaaagaattgaacaagataataatgaatcaatggatcattttgaaaatattcaatcaactaattggcaaactctgagatttaaagttccatcacaagattcaaaacctaattcaaataaacctggttggagagttgaattaagaccaatggaaatttctttaacagattttgaaaatgctgcttattcagttttctcaattttattaagtcgtgcaattttacattttagattaaataattatttgaatatttcattagttgatgaaaatatgattcgagcccatcatagagatgcaattaataaagatttattttatattagaacaaatataaatgataataatgatgaaataattaaagaattatcattaaatgatattttcaatggatcaaatgaatttaaaggtttaattccaattgttaaagaatatgttgaaattgaatttaaagatatttcaaaaattcaacaaaacaaattaaatgcatatttagaattaatttcaggtagagcaagtggtaaaattttaacaactgcaacatttttcagaaattttattaataatcataaagattatcaaaaagatagtattgttccagaatctgttgcttatgatttctgtaaatttgctaaaaaattgagtgaatatgattcagattcagttaatgaatttttcggacctaaaataggacaatttttaatagacaacaaatatgattcaatttttagaaactagatctataaattataaataataataacactaataataataacactaattaatatactttaccgtaattaccaccacgatgatatttcctcccaggtctgtagttatttcttaatttgccattaccctttgaaatatcttccttttccactaattttatatctctttcataataccctgtagtttcaacaccgttttcactaataattacgtaaaaggaacctaaaactaaaacaatcagtacagttataaataaataccacaacttattcccattattagcagatttctttagtttattatactcttctctcgataatgttacattatcattatcaatatgtttattactacgtcgttgcattaatggtttgaagaagaatatagaatacagagagttataaaaaatttaaaagcggcttgaaaaattagagttagttaagtaatgaatatgattgtctaaatcttacaggtttaacagatgctagtaattgcatttcatcaatccatttatctgatatattctcacatacagttaagcaaggtaaagatgtgtaaatatgttgcaatgaacttagttgtgatggatttgcaatatgtgagataagtaaaatagattgtcgtttagtgttgaatgttgtattttccattattatgtgaattcctgtaatttctatatcttcaggtatggtaatatttgtcaataattctgatattttagtggaattaacaatttgtaaagttggtgtaaatgcattgaacttgtcatacttatttattgttgtttgtagatgatcgataattgattgtgatatatctgaaatttccaattcattacatatcaacaaagagaatgaaataccatcaagcaatgcctctaattctgtattaaattccaatttccaatcataattatcttctttgatgaactcattcaatttggacttgattaatgatttattttgttcattttgaagtataactatagttggaatacctgacatttctcttatttgaatttcaattttaattcttttacttttctcattctcatacaatcttttggattcaatccattcagattttgttgaagtatattcgttatcttgaaaatcagtgtatagtttagaagcattgaaaacatctgtttgtaaatgatttattaaatttttcatatcaagtagtttatattttaattcatcaatttgctttttcttgtttattatatctgattcaattgaatttctcttagattcagcagtttcatctttattctttagttcagtatacgtggattgtagagaatcatgtttagatttcaatttgttgagttcatcagttaattggtctgattcaattgaaagtttttcattgttttcatcaatttccttactaagagatgttttatattttgataattcatcattcatatgatttttagcttgttctattttagttaataaatctttctttttcaattgtaaattttctaattttgattctctttcagctattgtctctttatcatcattatttgcatcattaactaattcttggaaggtttcctttattttttcttcctttttattaaattgtttgatcaaattatttttttgaaattcaattttttcttcaatttcagcaatttcaattgacattttttcagtttcttgtaaaagtatagaatttttcagtggtataccaatttcatattcaattattgaattatttaatttaatttcatttttctgtaaagttttcaaatttttacataattggttatattgaattaacctctcatcaatttgatgaagtagagtggaaagtgcaattctttcagcatttatatcagcagataaatgtgattgtaaagtatctaaataattatccaatgatgaagaagttgaacgttttttattaggtaatggtaatcttgaaggtgatattgtatgtatgtttgaatttgattttttaggggaattagaaggtgttgataatggagatgaatttcttgaatttgataattcagtagttgattttggtttaggtataagagatcgacgacgattattcattgtgtttaagaaaaaaagttttgcaggtggtatatgtatactagttcctcaactagtgatgttagatagtttatatagtggatagttggtatgaatatgccaaagaaatgtgatatgtcacaaaaagaagaaatgaaaagtaaacacgaaataataattttattttttcatgtcgtgttttgagggatcgatttatggaattaagattagatattagttagatgattatatagacaagaaatgtgtatagatgtaaccatcattcttcctttgaatgaccaagtagactccaagatcttgtaaatttagaaactgtacgtctgtaaacgaaataaagggatacaggaccaatgactaaaacaacacgaataaataatttaacataagattcagtaatttcatcaattgaaggccaaattgaatcaagtgcaggtaattcagttaatgattggaaaataataattgtagaaacaattgattcaattggttgaattgtaatgaaaacaagatttttcaatttataaatatttgcccccggatgattaaaagtacgtaccttttgagtattataatatctataaatgatttcacgtaatgattgaagtaataataataatgggaataattgagaacgtgcaattttaggatatctatgaagaattaataataagattaatttagcaaatgaagttataattgaagatatgaatgaagtaccataaatatgacgtatgacaatatagaatgatgataaatcataaattgttgagaataggagtaaattgatataaaaatctgcaattccaccaggtaaaaatcttgcccccgttagagggtataatatgcatagacgagatagtaggaaaatccaaaagaggagtgaagtaaaatttgcaagtaatataagtttttgagttttagtacgtgatggcattgtagagagagatgataaaagaaagagaagaagatgaaaagaacgaaagaaaagaaagaagtgaataaaaagtgacaagatacaaatgagaaaacaagatcaagattcatgaaaaggaaaccccagtaaacaattcgaaacaagagccatacgaataaataacagaaaataaaagaaaataaaattaaaagttatttttagtataataggattactaaggcgaggtattaatattaatattatggatgggatggaagctgttactttctttcatgttttaattgatatttgatattttgatattttgatatttctactttattttgacttgacttgtatttcgttttattgacatcatctgtttatttcctcttgttttcctctgtttacattatatactatattattgcatttatttacatttgttttaatataaattctattactgttgttctttcttcaccccttttttactccctcccttttcaactttaatcagccatggctccttataatattctatccattggtcgtcatccaaatatagctttctataattggagattaaatgcttcaaataatgtatctttaacaacaattgtttcaactgctgttttagatccttcaaatcaacctccaatttcaaataaatcttcaagtctcttataattggtcttcatctcaatttggtaataatagatatactttagataatgtttatgctaatatagatgattattcaaatttaacttcatcttcatcatctttaatagattttattttcttatctgcaacttcattacaagaattatcaactatttgtgcttcattaaatccaatcttgaaaaatcaattatcaaatcataatgtaccaacaattataattgaatcaactaatttcgttaatttagaacctttcgttaaaatgtctctacaattagatgatcaaatcccaatattatcaataatgtcagatttcgatattagagaagttggtaataataattatttagtttataaatcaaaaaaggaatcagaattagtttatgttggtaaaagtggtcgtgaatcaagttataattctcaagaaattggtttaattaataaaattgcagatttatttgaagattcaaatattgatgtttataaattaaatactcctttggaattcttatcttatcaatggaaatttgctttaccaaaagttacagttgaacctttatcaatcatatttgaaaaacctttcccttcagatttacaaaatcaaatattggcaaaacctttaatatcaggtttaattttcgaaattattacagttattaaaacaatgggttgtaaattatttaatagttatgataatgaagaatctttattggaaagattatctcaattatatccacctgttgatttatcacctgatgcagctgaagctccaaaactttattatgatttctttaatcaaaatcaaccttatttagatttattattattacaaccaatcttaattgctgatgattatcatgttaaaactccttatttagaattcttatatgctgttatgtctcaatataattcaaataatttctcaactttaaataattcaacttcaatcttttggttaagaaaaaattctgaaaatattaaacaattaaaattacaacaagatgaattagcaattcaaaattcaattcgtgaaaaagaaattaaaaaggctaatcaaaatttatcaaataaaactcctccaagaggtaatttaaataattttactccacttaatagatcttcaactgatcctgcaattgatcctgaaatggttgaattatctgatatggttaatagttatggaattgctgataaaacgcctccacctcttaattcaaataaatcattcagtagaagtgcaagttcaaataatttacaacctgctttcaataacaataataatatgaatattaatcaacaacaacaacaacaacaacaacaacaaccaggtaattcatctccaaattttatgcctcaacaaaatatacctcatggtttaccacctcaaggattaccaccaaatcaacaaatatttaattcaccacctcaacaacttggtaatgctggtgttggtggtcatccatctcgtagaagtcatttaaatgctcctaatggttatccacctcagaatggttatcctcaatatcctcaacaaaatggttacccacctcaacaacaacaaggatatcctctaccaccacaacaaggatatccacctcaaaatggttatcctcagtattctcaacaaaattatccacctccaatgaatcaatataattcaagagatgatgcatcatatatttcaggtcgtggatcttatatgaatggtagtacaccaaattttgatacatcatttggtagtatgactaatctgaattcaatgaataacggtatgaataacggtatgaataatagaggttttaaaccaacatcacgtaaaagttcacgtaaaagtaccgcagttatgacaaattcaattgttggaggtttcccagatagtaataatgcattaaatcgtagtatgaatcaacgtcattctatggcacctcaattatcaaattcaaatttaagaggttcaaataataatttacaaaatttaaagaaacctcaaaatttcagtagtaataatttgaataattttacaccaccaaattcaaatagtacaaataatagtggtgatggtttatcaaatggtagtaatggtagtttaccaccagctaagacaaatattgatttagttccagttcctgaagcaacacctgctccaacacctgcatatattccaacccaagaaagtaaaaatgataaacaaaagaaaaaacgtggatttttaggtctgggtaaaaagaaatagtttattaactttaatatcaaattcaaaataataaataaaaaaccaaaaaaaaaaaactcacgttatcagttataactaatcttaatcattatattgcatttcattacatcttccatttcataatccatatattacaaacatttcattttcattttcttattttaatatttattttacattaatttattttacattttgaaaaatacatttacatttacattaacgataataccattattcattatttattcttttaaaaaacttattaattatttaatttatgtttgttatttttgtatttttttcatgtttaaaatgttcagtttaataaatttataagtaattttaaaaataatactgtagaaaaaaattaagtaacatttcgtgacatgctttcatgcaaaaatctgatggattttactctaactatttcgttagataaagataatgcgtccaacacgttgggtattaaacacagcggtacgacagacgtttggtgatttgttgcatccaatcaaaccaacctcaaaaccaaaatctatcaaacatacaccaccaggatatgatatattacataataaattcaacaatgaacttaacgatatgaaacgattcttcaaatctacgcataaagataatgatgatatattaacaaaagatcaagtattatcattgttggagaaatatattacagtgggtaataatgctaatgttaaaataggtaaaaatattaaatgctaatcaaaggaaattattactagctgcatatgctaaggctaataagaagccattatctgttgggaatattaatggtgttaatgaattccagaggatgaaagtgggagtactgatgaaaagaaattggccgttgttgaaatatgttgtgaatgaatcaggaattaaaactgatgtcgattttgagaaagatgatgatgaaaaaattgaagtaaagagagttgaaaaagttacggaagtgaaaggaataaaagaggttgacgaagttaaggagaaagatactaaatctgaaaattttctttcaatgttgaaagatttaaagaaagttcatcaaacaccagttattcatgttttaccatcaatgacaaaatttgaatatgatccaatgattaaacatcataaagttcaatctaacataacacaatctgaaattgaacaatttgaagaaattttacaagaactgaaaactgaaagtgacaatcgtgatgaaaatttattcaaagcatcaaataattatgaatggtcaaagaatatgatgtttaaaatacctaaaactctagaaagtaaaacatttttcacaccaatttgtgtacctaatacattgataaatattaataatttccaaattgatttagttaataatttacatgataaattaagaaatgatttacagttttttgatattgatcattttaaaatacttaagatatatgcggatggatcaagcgggattttaacaaatgataaatctgtttattggaatggtaatattatgaatttatacgaactaatatctaacttgaaagatgcaacaaaattccagaaacgattcaatcaatcacttaatgggggttggatacccgtccatgcagatgaacgtgaaatagttttcgtattgaatcccagagattatataagcagtagactttatcgaataagtacaattggtattagtgcaatatttggtgcatcaatgatgataaattttatgaattttatgatataacgataattaattatgtagaaaataaatataatatgtatttaaacagaaatctatgtgaacgtaataatattaaaggaattgacataaatagacaaaattattccatttcaatatctttaccatcatttaaaataccattctttttaacaatacaaaaatctaaagctgtaagaccaccatgaccacctttccaagctctaagtttagcaacattaacggatgatcttaaatctggaattttccaaccagtttcaaataaatgattttcttgctttattctaaattctaataaatccatttttttacttggaggtctatcagctcttcgttgttgtttcattttagctaattcatcattatctctatcaacaaaactttgaattaatgatttcatatcatctaaattataagcttctttctctatttgatcttctgaatttataaattcttgaataaaatcaacaatttgattctcttcagttttacgcattgtatgcattaatttcttttgattaactctatcttctctaagagaagctctagctaaaagctgtgctttccttccctttggatgaagaggagatttcttcttgttaattttttgttggacctttaataatgattttgccattgtccttttgatctatatcgataacaacttcaaagatatagaaataaataaataaaaaaaaaaatatttttcatgtcaaatcagtaaacttccttaatagtgaaaaacttacccggaaattctctaccttaaaaaaaattattttttattttccattttccatttccatttccaatgcatgaaagacctctggagttggtataaacttataagatttggatatatctattagttaacgggattttgctactgatattataatggtccaaagatacacagaacaagagcttttatcatatgaagcaggtgcatgtcttccagatggagtggatttaaccccatttctcactttggttgaaacagtttctgaattattaagacaaattgatgaagcaaatcctcgtcgtagatcttttagtcattacaaagctttaagaaaaaataagacaaaggaagttgttgatgaagatggttggacatcatttgttactgaaaaaaatcctgatagtgaaaatattgatggtgaatcagcaattgatggtgatgatgtcaatgaaaatgatgatggttttgaaaaaccaaattcaaagaagggtaaacaacatacaattaaaattaaaactaatgcatctaaaatttctagtggtaaaagtagttcagcaaatggtgatactgttgcaatcacagaaacttctaaatttaatgctttcgatgctttagccttagatgatgatgatgaataaggtttacaatttaattaacaaaagcttttattttttttacacacatgtatagtttgaactattttttttagttttacatattaataataataattattatatttatgatataaaaaagcattatgaatttaacttctctctgattaattgtttaatgtattcagtttctcttttgattgattgttttttagaaactggtttgctatcttcagcatactttttactacttatattgttctcaaatctggttttaaagtcgttaatgaagttttgtagattctcctcacaatattgtttcattttttgtacatcattttcaagtcttccatctctttcaagttgtttttcgtacttattcgtactttccttcttgattttttccatctcaatgttaatcttctcttgtacttcattccatacattcaaagtatttttcattgtttcaacactatcacctttctgtactgacaaattaaccaatctaccttcatttattatggatttgagagacttatctaattcagaatcattatcattgacctcaacacgatgaataagtggcagttcttcctttatactctgtaatgtttctatttcttcgatttgttttcttaattcctttttaactgtattctgattccttcttttatcttcatcgtctataataacttgtggtttttgttttatgatatctatcccgtcattgaaatttatacgatcatcattaataatcatatcttgtgtcattaataaattgacatcaatttcaaaatcatccactggttcaggtaatgattccaatttttgattgattttgtgctttaattgtttcttcttacgtttggcttccctttgtttgattttatcatcctttgaatcagtcatatcttgtatagcatcttcaagtaacctctttcttgaaaacataccagacttcccactgtttctttctttcatctcagatatactagcaactatcagttgatctaaatcttcatttatttccttattttccttaaacaccaacttcctacgcttagataattcatgtaaataatttgaatcatcaccttcatccactactttcggtttactcaaacttgtattcttcttcttttcatttagctttttattttgttctttcctcttcttatctttacgtttctgtatctcaacttcttgattgaatgtaccctgtattttagttcgcttatcaaacatattccttagtttctatatctatcttaagttcttcagacgtatcaaagataccagcttcgggtcttctttcaaatgctatatctgcattataatccatttcatccttaaaatgttttttatattttaattgtctatcaattccaacttgttttaattcccttcgacgtaataattcactaacatttttactttcttccaataatctctcccttgcttttcttttcgcctttttaccttgtgtgtttgccaatcttgcttttgcttcacttatcatttccttttcatcttcattatcaacatctaaatccggtcttgcaggtttagattccggatttaagtttaatccaccaagtgaactacctgcaccagttccacgagcttgacctgattcaacattccctgtaagtaacaatcgattagctgtagatttctcaccatcctcaatttgacttacatcactattactgatcaattcctgatatcgttcaatacattgatttgcagttctgtttaataatagtgatatggaactccattgatttggacgtaattttgctaaattcaataacctcttatcctcttcaggactccaatctaatttcttaatacgtggatctaaccattcttgccatcttaatttacattgttttgcatttttccttgttaaaagtgatgaaactcttgaccattgatttaatccatattttgctattgcagctttaaggatttcatcttccacattggtccacataccacccttcacatataccggtgccatggttgactatatgatgatctatgcctatgaatatttcttgctaattccgtaaaatccttctgaaaacggaaagaacaataattttttgtgaaactcaaattttaatgaagcttagcgtttgtattattatggtgttcatcaccctctattatttttaatacagtccacttttatcaaaaatcttattttctctggggttgttatattgtaacctaattagatctcttattaaatcaatcagagtatatactgtatctcagttaaatcaaacttcaattgagtcaatatattaactagagtgtgtctttagattcaacagcacataatcattccatataaaaggcttcacgatgcagtcaatgttccgaccaaaacatcaaaaattaatcttacaatgttatccctcaaccaagttgagtacagctgaaactaaacccaatcaagcagaattaagttaccttgtcttctatgcatcctctcgtagaactaaattagagaaagttggagaatttttattgaagaaaacaacagctgatatatcacatcaaagagttggtcatttaaaagttacattgtacattttacaagaattaattgttaaatgttccgaagatttaggatttatgacaccttatgttattagtattatgaaggacattatcaagttaagggatttacctacatctcaattagcttgtcaagttttcattacatattgtgaaactttacaaaacattcaaagacaagttttttcatctaatgttacattactacagcaatttttagaagtaatttctttatttttgagtttttcatcaataaagaatagtagcggatcatcaaatgattggttaagaatatcattgaaaatttcattagtaattgcagaatatattgatgcatcatttagccaatttggtaaggatgatctaattcgtcaatcaatcaacttaattttagatacacttcaagtaaatcaaactgatttattattaggtaaaattaatacatctaattcccaagttagtaaacatgcaaatgataattcaattgattcaatttcacttgatgaattagccacaaatgcattaaaaatgtttttcaacacaaattcaaaacatcaattggactctgctaccaatagtgtattaaattattcaattgaacataacatggacattcgttggactaataatataatgataacatgtataaagaaatcgcatattgaattaagacatcgtgttatgattattatttcacatcatattcaaaaatatgctgaaaagaatgatgttaaaacacttggatatttacttagaattatttcaactattttaggatcaacattattacaatttattggattacctgttttagaaatatcaggtagaattgtcaatcttgaaaaattaatggttaaaaataatcaagttaatatcttaaaggaattgtattctgaaattgttagaaatcttgccagtagagtttattataataatcaaatcaatgatatgataacaagtattttctctaattattattatatttgtaataaaactgatgaagatagattaagtgaagaacatttattaagctataccaaaatcattattgataatgtacgtgatattattggaatttctcaaaaatctgatatcattattaaagtaaatgacttcccattatcaattttcaattatttgtatttacaattaccttttgagcaacatccaaatatttcacagcaagtgcaattgatttgcttgaaactagttgaagaattttattctactattgatcaagaaactacaaaacatgctaattcagaaagttgtattacaagtaattctgataataatttatgtttattctttgaatctttgaatttaattctatcacatgatgttagagatgaaattaaggcacagatttcattaactatatcagttatggttaaagcatttagaatcaacttattaattaattttgttaaagtttcaaatgtttggttatcagatccaacatcatttaaatatgtattatcattattaattttgggattatcttcatctgaaattaatggatcacaaaaacttgcagaattagcagattctcatattgcgtattctcagcaacaacatacatggccagaatatattggatactagaccatcaacaaattcaagtgattctacattaactaatgatgaattgatggctgttttgaaagatattgacgaagtcaattattggcttgaacatattaatatcaaagaaccattatcatttaatagacaaataccaaaaccatatagtacactcattttgatgtctgcaagtaatagtattttatcatttcctaatgaatcatctggtgaacatatcaataatggaacaataaagacagcatctgatacactatccaatattccagttccaagtatacgtcaagatggtaatgcattagatgaagtattaaataataatgaagagggaacatcagatataaatacaagttatacaatgagtgagaatgattatagtgatattgaaccaccgattcattttagtaatggaataatgagtggtaatagaagtttaagaagtggatttagtggatttagtggacgtagtagtcgtgcaggtggacgtcgtatgaatttaaatgagttgaaaagtataagaggtggaagtaattccaatgcatcagaattaagtaaactggttaaaatacgtacaggaagtacattgaatgcaattaataatggtggtgcagttgataatgtaaccagtaccagtcgtagtaatggaaccagtagttctggaagtgggttagcttactctataagtggactcggtcttgatgatgatgatgaagatgaagatgaggacgataatggtgataatagaaactatgctaacggtaatgccaattagaagaaaagagtgtgtaacaagtacatagtgtaaataataatattattaaaaattaaaaagaagataattattcctgaataggcaatatgtagaagtagattacatgcctatccttacgtaatacacagctcaccataatcatacttttctgtttatgcttcgatgctctcaatgtgttacataaagacaatagggaaagaaaaaaatattggaaacgctctctccttagggtatttttttctctatttgacctgtttactattatttatttatttatctgccttcactttagttgctatcagtttattacactttctgccattttgttcatcttgcttatttatcaaccactttctctttatctttgcacaagtataactacctttcattgaacaattggcttatattcccctactatacctagaatttaccctctttttactctattagttcatacaaattttaattaattaacactcagatcaaacaatcaatatgggatttaaagactttttttcaaaaggtcctacaggaagagtaagtatactatctttcattcaatggcatttcaattgaaccataatatctttactttaattaattgttcaattatactaacattttacccctaccttcacggcccccggaaacttacttcctttcccgcccaatttaaatattatttttaaatagcattcctctgacactacctattaccatcaaggcttaccaagctcagctcatatggctgcaactagtgctaccaatactagatatcaaaacaatattactccaagtgggttactttcaacaagatctttgagagatcaacctcgtcaacaatcacatcgtacaatgtcattaactggtagaagttcaagacctttagatagccaaccaagaacaatgtcattatcaatgagaacaaattcagttaataatacaaatagaagataccaaaattcaaatactagaacaatgtcaatgacaagttcaaatgctaatataagaccatcaatatatcaatggtagtggttcaagaacaaattctttgaattctgcatcaatttcccgacaacaatatcaacaaccatctaatcaacaacgtctttcaagaacaagctcaagaaataattcaagagcctaactcattaaattcaaattcattatcacatactaaaattatcaaaacaacaaaggaaaaagatgctgatggtcgtactaaatcaattacaactacaactattgaaaaaagaggtgatgttaaaattgttcgtacaaccgtaattcaaccttcaatttctcaaccaattgatgaagatgttgaactggaggaattagcagaattagaagatttcgatcatgataatacaattgatgatttacattataatcatcaatcacctgcacaacatagtaattattcacacaccccaacaagaagaggtcaaaatcattttgatcattttgatcatgatttcgatgcagatgtcgacctgaatgaagatgttgatctggttgatcataataattatttgactgatcaatattatgaagatccaatgaaaaatggagctgcacttgcagctgctgcagctttatctcacaaatcaccaaatagaggttattctcaacatcatcatgatcaagaagctttaaaattaaatgcaagacaaactgaaattgaagttcaaaagcaacgtcaattacaaattaaacgccaagcggaaattcaacaacaacaagctcaattaaaacttgaacgtttagagaaaaagtctaaaaaaattatgcaatctagaatttcaactcaagaatctccaaatcaatctcaatttgtaactcctaccaaaaaatcagaagttagatttcatgatgatgaggcttttggttctgattttgatcaaaatgaacaatatgataatgctatctatgacaattttgcaaacgataaagtagttgaatctttccaagatccagttgttgctgaagctgaagttgaagaaatcatggttgtcactcctgaaattccacaacaaagtacatttgatataaaggcaagaaatagactgtctgaaattcaagaagtttccgaaatttatgatgattcaatgatggaagaaccgattgaaaataaattcgttgataaagtaccagctgttgatgtcattggtactattcctccaaacttggtcgcaccaaaagttcctattaataattcaatgtcttcatttaattctagtgaagataattttgttgaagcacaagaaaacttttcaaatgatccaccggcaataactaatatcaatgaaagagttgatcaaaaccaatacgtttctaacgttgcaacaaccccaaaaactgaagcacaaaaccaacatagttatagaaatttgttagtcaatggagctacaaaatcaccagcttctaacaatattcctcagcaaaattatgaaggtgactatatcaaagagtatggtattttaacaccaccaggctcaaatggtttggtagattcaaattttaaaccagttgtccaacaaaaacaaccacaacaattaaaatctgcacttaagactagtgcatcatcaattgctagtccagcttctgaaccgcgttcgcagttcactaacatgacaccaattcaaccaaaacaaaaagaaataatcaaaggtcctgatggaattgaatctggtagagctgtgatgacacctgatgaaatgtatatgattgctctgaaagcggcggaaaagaaagtttatggtgatagactgaaccaagtttatccagaccctgatattgatgataatactaaattgaatactattgttaataccaatttgacttcaccacaactaaatgatgattcagtttccaaaccaggtgggcaatatcaatctaatgctacaggtttaggttttaaagttcactctctgagagatggtcatggaaaaccaccaaaggttaattctgaagaatccaataaacttaaaaagttgtttaagcaagagcaaaagcaacagaaaaaacaatggaaggaagaaagacgtgagaatattccagatgatctgctgaagaaagtagcagctaaagttgaaagagatgttaatatgatgcctgttgatcctaatgttgaattgcaaatgatgcaaaaggaacaagataaattttttgaagaacaagagagaatttcaaatcagccaaaacctgaagtcgttcctagtcaacaacctgaagcaattacagatatttacgcaactccaaatgcaaaatcaccggttgatcattccaatgttataaatgttcaagaaaaatcaccaactagtgtgcctaaagttgaaaaatctcctagtaaactgaacctgaaactttttagattaactaaaaagaaaagtaataccaccaaagcccaacctggtcatagaaaaaatgattctattgtttcacaagaaactgagtattcaaatctgtctctgaaaaagcaaaagtcaaatggtagtagtgaaccttttaaaaagaataaattcttctcatttggaagcaacaacaataacaatgttcaaaaatcacctaaagaggtaccaaaagttgttgaaaatattgaacctgttgtcgcaacacctgttgtacaaaacgaaatttatgcacaacctgtcattaataataatgatatacacactataccagaagatgcaaatagtttagctggttcaccaatagtagaatcgaaaggacaaacaattgctaatgagacattcactcaaccagttattccaggaataaacgatgctccaaaaactgataataacggcagtattgaaggtctggaaaataccagaactacaaatgttgacagtattgctacaactaattctagtaaaattgccagtgttgctgaaaatttaccatcttcaacacatacaccaaatactgatattgaagatggagaagtctttatagatgcagaaacaggggaagaagcagaagttaaagccgtccctgtaaaaaccatcgaacctgtcgtcaatgaagttcctgcaaaatcttcatcaaagaccaaagcatctaccaagtcatctaccaaatcaaagaagagtaaaggtgaaaataagtttatgaagtttttcaatctttgattttctaaatcacaaccaatatacatacacacatgtgctcttttatgcttctttaaattgtttttgtttaaaattgttttattctaataatataattgtatatttactttgtttaatcatttgtatttctttaattgtttactttattgagctatacgtactatatctctaatttttgtaagtttagtgttctccatcgttactataccggctgtcccgtgtaaataaagatttttatgcgggcttaaaaaatgtacttcccacaaaaattatttttttaagttgagttaaattatatgcttgtcagacattcaatctttatttcattcaaattgaactattcagaagaatatagccattgttactcaattcattcaattcatacactggtaaaaatggagtcatctgtaaagttggaaaatacagaagaaacttataatgttgaaaaatcccattgttcatgtaagggctaaaacattagcattacattggcatgagaatgcctcggcaatttatacattaacaacccagcctggtaaacctggtgaacgttcagctagattagttacaggtggtggtgataataatgcacgaatatggagtgtagattatagtgaagatggtaatgaagttgttggagtgaaatatttaagtagtatcactaaacatactcaagctgttaattgtgtgaggtttaataataatggtaaattattagctactgcatcagatgatggtacagttatgatatgggaattaagtgataaaatagtgagagaatttgggcaggatgttgatgatgatattaaggaaagttgggtaatgaaagttgcatgtttctccagtacaatgagtgaaatttatgacatttgttggtctccagactctaaatatatttgttgtgggttgatggataatattatacgtatatttagcgttgaaacaggtgtaatggtaaaacaaattgcagaacatagtaattatgtgcaaggtgtcgcatgggatccaagaggtaattatatttgttcacagagtgcagatagaagtgttcatgtgtacaaaataagtactggatctaatggagagttaaatgttggaccaactgcattctataaaagtattaaaggagagacgaaaccttccaaaatagttaatgagaacaaacaggaggacaagaaagatgaaaagaaggaaatcaaaccgaatattgaagtcagtaatgatatttcatataaagtaccaactgctataaacagtgctaaccttcaaaatatgttttatgaaccaataataaatacaattcactcaagtaataacaatcaattaaccaaggaaaatatacttcacagtgtagttactagtcactcatctgcgagctctacaatgatggaaccaccagtacaggctccaagacataaaagaacgtactccaattctagcacgagctcttcacatagtcatatcagtagatgcatttcaccatcaccaatgccattacctgcagttatgccatcatcacctagtcataaacaacttggcctgaccgcaataatttcttcatcaaataaagctacgaataatgataacgcaactgactcacgtacttctagtgtacaccttagtgctaacacatcgcttacttctgttaatgctgatacatcatcatctgtaccagcccaatctattaatacatcaaatgctacaacaataagtactacatcaaatgggccaagatatcattatttatatcataatgaaacgctacaatcatttttccgtcgtttaacgttttcaccagatggttcattgctaatcacaacgtgtggtatttacaaaaatgttgacaagaaagacgaaaaaaataacaaagaagtgatagagaatacggtgtatgtgtatatacgtgctggtcttaacagaggaccagttgttcatttaccaggattgaagaaaccagcaattgttgtgagattcagtcctgtgcgatattcattaataaaagcacataatgaagaaaacgtatttaatttaaaatacagaatgttgtttgctatagctactcaagatagtatattggtttatgatacacaacgacttaaatgtgttgcgatagttacaggtattcattatgcagtgataacggatattgtttggtcaagtgatggacgaagtatttttgtaagttctaatgatgggtttataagttgcgctattttaagtcctgaattagttggtgatattgaaggtggatttaaggaagaagagatgaaacattttgaaggttatattgaagctgaaatggcgaataagaatgaagtagtgacgaaagcttctgaaaaacaagatacacctaaaaagcctaaaatcaacacattatcaacaaacttaattagaaaaaacaataaagcttccaaaagtgtttccacaaatctaccaccactgccaccggcaaccatagctgtcgagcaaagtgaacaggagaaactggcagcaaaagaaaaaagcgtaattgaccttttaatgaaatctcagaaaaaagacaaaaaggatagcactaaagttgatgctagtacagatgcatccaaaagactgtgtaaagataaatgaggacatttacttgtttaatagtataattatcgactaatgtttgtgtattttatggacaaaacaagcattaaacacatgcaattaatatacagtaaatttaatggaagagactctcagagcaatttttcactaagtgaggaaccactcttggtaaaatattaatatttttgatgttgaagttttaatcgataacaagacaccttttcttttattatttgcacaaccatactcttgaaatactacatataataccatggactttcaccctgtaacaattgttttaggagcatttgttgctcttattttagttaattttttctttttcgacaatcaaccacctcgtgtgagttacagagcttcaagaaactttgtggtaaccgatgagatgattgaaacagttcgtgctattgggcccggattaactacattacaaatcaaggcagatttgcaacttacggggagtgtggaagctactattgatagatacctaagaggttctattgtttccacggaagatataactcctgaacctgtaaccaaattggaatcatcaaatattaataattcattatctgataatgatgggaatggtatgtttaatggtcttacatttgatcaaatgaagagaaaaatgattttagaaaacaggaagaaatttgaagcaaaatatggaactattagtatataatataaaagaaattatgtatattatttaggtaggtggtgatgtaagttagttaatttataaacaatcaaatttactatgatctatcgaaatgtaatctgaacttatcgttatccttccgtactttataaacaaagttcattataacttcactttctttaacttgtaattgatttttaaaatgattttctgcattgatttctaaatctttgtcagttctgtaatcatacagattattttcagctttacgttgttcatttaatgcagctgattcagttctgtttcctaattcattgttttcaagtaacattccttgaaatgtatgtgcatcagttgaaagtaaatgtgatggatttaaataacggactctatattcacgtaattcatctaatgataacgtactgaaatcaaaagtttccttttgtgttgtattatctggatgattattatgaacatattttgcaatatattccttttgaacgggcactacgtatgggggtttctgtttttgtgaagttctagttgacattgttatggtgtttaataacagagaagaaagaaaagcagaagaaaagatggatgatttaaaaaataaattatcctgtagcggaacttaaagttatttatttacctctttgtacagaacatgttggagtatattttgataagtaattacaacattgaattagtaattaaatatattatatatatatatatatatatatatatatatatataaattaaagaacactgtataaaaacttatagaacatttaaaactaaaaaaatacccctatggattaatcagaacagggaataccacaatcatctttaaatttcccattatcaaaacaatatttaacataattatgtgcaaataaacgactctttgttaattcaccaaccatattacttctttcatcatctgcccaattatgtgcttgaataaggatcaataagaagaaaccttcaataatcattgtaggagtatttgcaactaattgtgcagtttctgaccattcaatgcacaacccataataattaaacctaaagttgcaataactgatgcaacaactgaccatttacttgaacaaatatcattaatccataatgaaatcttagtacttaatgtaattttcggtttatatctttctaatgtatatgaaataccaataaattcaagtaatccttgtgaatcttcaaataaatcataaaatttttgatgttcatatttagtaagtgaaaagaaaacttctcttaaaacataaccatcaacaaatccaactaaaccagtatatgtaccaataattaaccaccaattatcattccaatgcattaaatcaccgattccaaaccacataatgaaaacacataatgtaatgattaaaccctaaaccagttaccaataacattagcatagaaactaataactttttgaatcttatctcttggacatctcttccacaacaactaattcattatcttcaacgtcattcaaaattgttctttcaagacattccaaatcgctatctaattgaataaataattcaatttgtctattaataacatcattagatcttgctctaacatgttcaaggaaaacagactgtgaaaagtagttcaattcgcaactgcaggtgttaatatacatttgccaattatttgagaatttttgcatcaatggttgactccttgtaccattattatttggcattgcaccacatccaatccacacaaaaataccaatccaataaagtataacacaatataaattacctagtaacttggaacaaacttcagacaagtttatcaaaccatgttctcttattctctatatgtaataataaatcactttcacaattatctaaatcaataatcctcttctttcaactcgtcagttaagataaaatcaggattctgatcttgcatcttctttattaaccttctgtgagttctcaatctactctgtaatttacctgataaaattaagaatttttcattatcatccaattgttgtctcataaggaaagtatcccaaacataagtttgaatagattgaccatcttccataacaatttgccaagtatcaggtgcacccgtcacagcaccccaaataacccatgcaattaaaattacaataactagaatcaacatataaacagaacctgtaacatcaacagcataaccaatgaatgtgtccaatggagatgtgatatcattatcggattcaaattcctccagtttttcaattttttcaatttcttcctcttgttttttccataaattttgaactttattaggaatgtaatcaaccacattcataaatttgcttttatttgaactttcgacattagttgtactagaatcatcagtatgagaattttcaaaaattgatcgtcctttttatcacttatactatcagaaataaggtttttcggagttgcaatattacaacgaactttaatgtcacccttatttggcgggattaaaataactttaacatcttcccaaaatgtacttgaaggcatttttaccaaaagtaggatattaaatcagtggtaaaaaatggcatcttttgtaacattagtttaaagtaagaaaatatgtttccttataagagacaagcccaagctaacttctatacctcatcaagtttaattaacatagattatagaaagactataggtttattcacaatacgcaaccgttgaaaatatgtcattcactaaccatatataacaatgcatgaaaatctatcgaaacatcaggtggtggacccttaaaatttttctagcttcatgataagaattgatgatagtatcaattaattaaaccacaataggtaattgctatcacctgtcattcggtggtatcggagaaggttttatcaatacctgatttgtctgttactgataagaaaaggacagtaatggttatagttatattgctcttgtataaaggtatttttgtgaattacctgattaacctaaaaatggttagcatatttaatcaaatttttgatgatattttttactaatatcagctagtacagttttttaatgatagttatattccttttcaattaacctagtaaagtgaagatgttggttaaccaaagattaatctctctatgtgtagtataatatactgaattgaactgaattgatgtggtattgaattgatgtatcgatgaggcttagaaaaatgtattgtcgattaaatacagtacatagttactcattgagatgttcaacaagagttgttaattttcataacagtatctcttctattataagatatttataaaagaaacagttgtagcaacaattatggaaagtaatgtcccaagtgggtatttcagatgagcaattattttgagcaattattttgtttggtgaactttatattgatcaaaccagtaataacatcggtaatatttcaagacttgtcgtatataatgtaatcaccgtcggtgatattgattagatacattatcaacaataacaaaagcatagaccatagagtctttgtagaagtagaatttccgacaattcaccctctcttaattggtgaaaattatatgagatcatggaaaacccactgtagtgagtctttgtatagaaggttttttctttaaagcaatattgcaatgttcagatctatacaaggtactgtccgttgtcacattaaacctatcataaggaaaagatcatattctttaattaataatggtattaacaccattaatataaaaacttcaatactaaataataatcacacatcaccaatcaaaagatgtaaaaattcaactaataatttattatttcaacaattaagattcaatgcaattactgcatcaactgatggatcaaatatacctgaagatgttaaaaatttaacaattgaagaatatcataaacattcatcagaaacttttgaacaaatgcttgatgaacttgatttattctttgaagagaataaaataatggaagctgaaattgatgaagaggcaggtgttatgcaaattaattgttctgaaggttcttatgttattaataaacaacctccaacaaagcaaatatggctgagttcaccaattagtggtccaaaaagatttgattaccatataaatcaatggatttctttaagagataatatcaaactttctgaattattacaagaagaaatgaatttaatgtatggtaatttcaagtggacaaaacctttctaatttgaaattcaataaataatacttaacgatctatataattctttataaataaataaattaaaatactaaaaaatgcctgttcataataagtcaacttttttattttcaatttcaatttcttgttcaataatttgttcatcgttgttttcattattaatattattattatttttgatataattgtaaataatagttcttgatttagttaattcctctaaaattaaactacgttcacgacttgcccaattatgagcttgaactaaaattaataaaaagaaaccttcaataatcattgttggagtatttgcaactaattgtgcagtttctgaccatttcattgcacttgctaaaataactaaacctaaaactgtaataaatgaaaaaataactgaatatttacttgaacaaatattattaataaaaattgaaattctattagatattgtttttttcaaaactggtctatttaattcaactggtaaatttaacatatctaaaaattcttgtgaatcttttaataaatctaaatattttttatgttcataatcagtaattgaaaagaaaatttctcttaaaacaaaaccatcaataaatccaactaaacctgtataagaaccaataactaaccaccaatttgcactccaatgcattacattaccaataccaatccaagcagagaaaacacaaattgaaataactaaacctaaaccattaccaacaacatgagcatataaactaatacatttttgaattttatctcttggacatctttcaacaataactaattcattttcataataatcattattaatatctcttaataaaaattctaatttggaatctaatttattaaataatttagtttgatttgaaataaaatttgatgctctatttctaatattttctaagaaaactagttgtaattaataattcaattagcagttgcagtattaacatacatttgccaagtatttgaaaaagtttccatatctggtaattcctttgtaccttcattaattggtactttaccacaaccaatccaaacaaagataccaatccaatatagagtaacagttggtaaactaccaattattttaacaaaacaatcacaacatttatcataaaaactagtacttttaaaattaatttcactatcgatagtttcttcattataatttaattcatttaatggtttaaaatcatttaattgagttaatgaatgattaatatcatattttgacaaaaaattagttaataatcttttatgagtaattgatctacttttcaatttaccatataacagtaataaattttcatcattatctaattgttgtctcataaggaaagtattccaaacataagtttgaattgattgaccatcttgcattacaatttgccaagtatcagaagcaccagttaaacaaccccaaataatccaaccaattaataatgacatcgcaataattaaaacgtatatagaaccagctacatcgactgcataaccaataaaagtatctaatggagaaggtaacataatattcatcattttctaattcttcaactttatgaatttcatccatatgttttttaaataatgaattaattaaatttctaaatttatatagattagagtcaaattttgataattttttttcattatcttgatttttctctgatacttcaatgtcaaaattatccatatcaatattattattatcaattgaaagacgatcaggcatttcacatcttagtttaatagcaccttttttaggtggtaataaacatactttaatatatcttagaacattcatttggtgattaaagaaagaaaaatattctagagacatgaaaaagggaccaatgaaaaggggtaaacccttaaatttataaaaaaaaacccgtgaacacgtaaaaatgccttccttgaaactataacacgatcagatcaaaataataaataattcccacattaattaccgagtgttttaaaaatagattcaattgccgataaagttaatatacacggtgtagtgggataagagttatacagcaaattaactcagttgctattgtataaatataagtaagtatattacatgaatgttataataatagtagtagtaatatctatatcttggaaataaaagaaaagaaaggccattaccctaagcaataatatagtcctaataacttacttacttataaagaaaagacacaaacaaaaaaagatgagccttcacataaaaccacgtcgatgcgactacaagagagagaaaaaaaaaatttccattgattacatcacaatgagtattggttatttaatatttaatatttggtatttattaatttttcaagtttttttgttgaaaggtctggtctggtctgggataaattttagttttgaatttttttttattgaatttgtttgatattttacatttcttctatatatttccccttctaagatcaatacaatgtctatctccgcatcaaaggctaaaagagaagcaaagaaagctgctaaattagcagaaggtggtaaaaagagattaacaaagaaggaaaaggaaaagcttgaaaatcaagatgttggtgaatcagctgctgaagcaattgaaaaattaaaacttcaacaagataaagatggtttatctgatagagttacaactggtgtcttagattctttagttacttcaagagatattaaaatgtcattctgtttcattattatttcatggtaaagttttaattcaagattcaacaattgaattaaattatggtagaagatatggtttattaggtgaaaatggttgtggtaaatcaactttcttaagagctttagctgcaagagaatatcctgttcctgaaaatattgatgtttatttattaaatgaacctgctgaaccaaccgaattttctgctttagaatatgtcgttagagaagctgaagcaactttagctaaattagaaaaagaagttgaagatataattgttgaagatggtcctgaatctttattattagaacctttatatgaaagaattgatgaaatggatccttcaacttttgaagcaagagctgcaattattttaactggtttaggttttaattctgttacaattaaaaagaaaactaaagatatgtctggtggttggagaatgagagtcgccttagcaaaagctttattcgttaaaccaactttattattattagatgatccaactgctcatttagatttagaagcttgtgtttggttagaagaatatttgaaaaaaattcgatagaactttaatcttagtttcacattctgaagatttccttaatggtgtttgtactaatatgattgatatgagattaaaacaattaatgatgtatggtggtaattatgatgcttatgcaaagacaagagaagaacaagaaactaatcaaatgaaacaatataataaacaacaagaagaaattgttcatattaaaaaatttattgcctctgctggtacttatgcaaatttagttaaacaagcaaaatcaagacaaaaaattttagataaaatggaagctgatggtttaattcaacctgtcgttcctgataaagttttcaatttctcattctctgaagttgaacgtttaccacctccagttttatcattcgatgatatctcatttgcttatgaaagtaatccagatcaattattatataaagatttatcattcggtgttgatatggattctcgtattgccttagttggtccaaatggtgtgggtaaatcaactttacttaaaattatgactggtgaattacaacctcaacaaggtagagtttctcgtcatactcatattaaattaggtgtttattctcaacattctgctgatcaattagatttaactcaatctccattagaattcgttagaaataaatattctcatatatctcaagattatcaatattggagaggtcaattaggtcgttttggtttaactggtgaaggtcaaacttctcaaatggcaacactttctgaaggtcaacgttcaagagttgttttcgccctcttagctttagaaaaaccaaatattttattattagatgaacctactaatggtttagatattccaacaattgattctttagcagttgcaattaataattttaatggtggtgtcgttgttgtttcacatgatttcagattattagataaaattgcaaaagatattttcgttgttgaaaatcaaactgcaactagatgggatgcatcaattgctgaatataaaaagaaattggcaaagaatgttgtcttataatcctttcttatttattgcaattttcttttcaaaatcacttttcttaatattctatgttctttttataatttaagtttatttaaagtataaattttaattataaggtatatatttttcttgtgtattgtagatcatgacataactttacgtctcttaccagctaataaaactttttcctccttttcatcattatcaatacctactttttccaataatttactgacgtcgtcaatactgttaattccattatctaacctcactctagcagcaaagacaactccttgtgcccaacctgcctttaattcccaaaactctttgaaaaatcttttacaaatgggtatattttaacatcaactgctttattacttaatgatttctttaatattgatttatttatttctaaatcatcattatccattgaatccacccaattattaaattctgttcgatattgttctcttaatatattccaaacatgtgtatcaacgggtactaagtcatgacatttacatcccattaatgcaacacaatcggcaacttttggcccaacaccatcaaattgttttaaaaattcaacgcatataatatctctatctattttatcaattgtttggaaatcacagctgttaagtttttcaaataaaattggtgtttcaatcattttagttacagttttggcaatatatttagctcggtaaccaaaacctaataatcttaaatcagtttccaatttggaatacatttcattagatattatattgctattgatatctccatatttttgataaaaatcaattggttttggaaatgaaaaatacggaacattggaatgaaaccctaataatgtaccatatttcatacaaagtacttcacagagttgagatattctcttgatattattatttgatgatatgataaatgaaactaatgtctcccatggatcttgcgataaaatacgtacaccataagatggatcagtttcttcaatttctaacttcggtgaatctctagtacttggaggtggagttggtattatttctgaaaatttctcttcctttatgtttaatattgattccgctaatattggcattttgatattcttatctattttagaccaatgtttataaagttctaaagttgaaacatttaaattaaaataagattccaaaaaagttttcgtttcaatcttggaatcctttgattctggtatgtgtgagtattctattatacgtgtattttcgactaatgattccttcaatagtaaaattttattatttagggcacatgaccaaacaccatcaatatatcgccatctaaaagcttgtccacatctcaatactgttggtaagtctagttccaaaggtgctattttcaacgtttgccatttcatctttgactaatgaaaaaatataacgtgtctggaattcagaaattcaatcttttcttttatgaaatcaatgttatcactgttaaaatttttttttcgtgtctcggagttaggcgttaatttgtcatatttctatttctattacgttattttctatttctattcctatttctatttctatatgtctatttatgtctattttcattaaagaaagagttttatacaagttataaaataaatatccattatttagcttcctctgctgttcttctattagtagctaacttgatttgtacaagtttacgaattgtatcattaactggtgcagacatttcattttcaattgcctttttaacaatatgaccattaatataatcaatttcaatatttcttaaattaataacatcttgacgcatacttgttgaatttttactattaattgtaaatccaacatatttaacaaaatttaattgtttttcagtatttaataaatctttagctaattcagatgattgtaatgatggataagctttaaataaaactttcaaaccttctgatataattgcagtaaataattcatcagtttcctttaaatctgataatttataattaatacaatcaacaattgaagttgttgcattcatacaacaattaactaagaatttctgaatttgataaactaataattcatcatatgaataaccagttacatttaaatcaccatttaataatgcatcaatgaatttatcattacgcattgaaatttcatcttgtttcagttcttcaattgaagcttttaaatttcttggaatttgacaaattttaagataaccaaaaccagcatgattgtaattataagtattattttgttcaggtgattgccaaacaccatgagaaataacaccttgataaataatcggtctttcagattcctctttccaaagtttttcatataattcatcaactacacccataccattttgaactaataaaattttagtgtgactattgattttatttaataatggagttaatgcatttacagtatcaaaagttttcacacttataagtaaaaagtcaataacaccatcaggtatcgtttcagtagtatatgctccattaattttataatctataattttatcattattgaataattgtttgatttggaaagtattgttagtatttttcagataatttaattttgcagcatttcttacaatgaaattaacattaaattgtttacttagtgatgaagcaattaatgtgccaacaccacctgcaccaaggacgtaaactgacatatataaagaatttgtttggtgagtagaattttgtgtaggattttacagttacaagaccatcgattttgaaaaactacggtgaaaaatattgtcgactgtaaaccaatgaattttcttgaagtgatgagaaacgccacagtaaaaggactataatggttggaactttgatatagggaatgattagtatatacactacatgatagaaagtttttatattcgatttatctgtaataataccaagtatttgatgttttttcgtataaggaaagaaataggaatgagataaaaatgcattatctcaaatccaacaaatacatctattacaagaaaattttgtcaagtaaatagaaatagcaccgataagtattaatatcaaattacatcacatataactacttagggtaacttaatctatatcacccactttatgtaacgggtatatattttaagcaacccgctaaaagaacaagatatatctcatctcttacactgattacccaataaggaagctccaagatgtactgagagatgtatatagggtataagttccctagaatggcccatccgtatctcttccgcactctctacagatttgaagacttgtagactcagatgtaataggcattaaagttagaaataacgaacatcttaatgtaatctaaaacagataccgttctgctacaccttcctatttgggcttatcatcggtggtttattaagataaggatttaaatttttcatttaattgttatcttttttattgatgatgacgaaagttgtttaatatcatatatccaagtagagctgggagtgtactattaggtttaattgctatcggtttattctaatttacttctttatctaaggtgtgaatatcttcattttagattacctaggttatctattatccttaatctttaatcttttattatctttcactgccttgatttttttttttcaatctataatctttatttctatttttataaatattaacacaaattcctcaatcttaagcttaacagataacgtatattaatcttagcttgtttcttataacaaatatatttttacatttcttagtttccacaaaacaactatcaaataatgtcgaatatggaacttaagccaaatatgtcaatcatatcggttgatgatatgaatgtgacatcagttttatctggtcgtcatgaaaaaattgtaatggatcataatgttgatcatgatgaagccgttattttagcactgggttataaacaagaattcaaaagagaattctcattattaacaacttttggtgtttccttctctgtcttgggtttgttaccttctattgcttcaactttatggtattctttagcgtattcgggtaatgctggtattacttgggcttatttgattggtatgattggtgttatgggtgttgcttgttcaatggcggaaatttcatctgctttcccaacttctggtggtctttattatgcaactgcaatgttagctcctccaaaatataaagcaatattatcttggattgttggttggtcaaattattttgtccaagttacaggtgctccctctgttgcgtatggtggtgcttcaatgattttagctttaaagcaaataatggatgatagttatgtttatcaaacttggcattgttatttattaactgttggtttaactttccttgcagcaatcattgcttctctcccaactaaatggattgcttggattaattcagcttcaacaattttaaatttgattttcctttttgtttcttggattgttgttttaggtggtaataacagagttgagcagggcttacctaaatttaattcaaataaaattgcttggggtatcgataatttaactgattggcctgatggaatttctatcttaatgtctttcatggcagttatttggacgatgtcaggttttgattctcctttccatttggctgaagaatgttcaaatgctcaagttgcaactccaagagcaattgttttaactgcttcagttggtggtctattaggttttgtctttcaaatatcaatggcttatacaattgttagtgttgatgatgctgttaatgcagatttaggtcaaccttatatttcctatttagcccaaattttagatactccaagagttttatgtcttgcatcatttgcaattattcttgcctttacaatgacttttgcttgtatgattgctgcttcaagagtcttgttctcttattcaagagataattgttttccattatctagatattggtgtcatattaacccatatactcaaactcctgttaatgcagtttggttaaattggttctttggttgtttattatgtttacttatgtttggtggtgttgcaattgatgctattttttcagttggtgcaattggttcattcatctctttcacaattccaactttgttaagaattacatatgcacgttcattctttaaaccaggtccttggaatttaggtagatattcttatatttcaggttggttagcagtctcatttactactttaatgattccaatcttatgtttcccacaatatagaggtgcagataatactgcagaagaaatgaactggactgtcttggtttattatggttcaatgttcctatgtattgcttggtattacatttatgcacataaggtttatgatggtccaaagagtaatttggataaatcaactctcattgaagatgaaaatgaagaatatcaaatcattgattcagttgttagtaaaggtggtgtagtcaattatgcttctaatgaagtaaatgatgaaaaagcataatttcattaatttctaattatcaaattttaataatcttttacgtatatatatatatattttttttgctatttatattctattttttatagaaattaatcagttatcatataagtttgaaataggggtgaaggaatttgtaaaattttaagtagtgccatgtacctatgtcaatatgagttctacaattagtgagtcagtcaaaaaaattgcacatgtgcatgtacatagcaaattgatccagcaaattgatcctttcttattatttgagttgatacagttttgataatgttttttattattatgttttatttaatatattgataagcagattttctatctcctatggcatggtaataatttatttaccgttgtgaattatagtatttcgatgagcaaactataatctaatctccgaaaggctcaacaactaaacctccgatttgactgcgcttataaattttccatcttcacctatttttcaaatcactgtgggaataaatattaatttgacgatttggagaatatcttactggtgtcttttccctctaaacaatggttttacataacgataaatggaagtataaggcgaagaaagctgttgagaggaaaaatgcacaaaaggctaaaagaaatggtattgatgatgccaaagtaaaccatgaaaatagttctagtggaaatgaacattcaagtgatgacagtgaggaaggagatgatgttgaagaaattgttgacgaagactggaaatgttatagtgaaacctaccaagaaggagaaattgaagaatcagagtaattcatggagatttgaagatccagtcattgatgaatcaatccttaaagatcctgaatatattgcacaacttgaagctaaaaggaaagaagaggaagatagaatcaatcacatgagagatattgttttcaaataaattgaaaactggtgatattattgatgaaaacagtgatgaatatttacttatgggtaaaaaagaaccgtgttagttttaaatatatgaaatttgaagatttagagaatgttttcaacgctgatgataaagacaataataaaccagaaattagagaatttaccgatgaagaaaaggaaagatttttgcgtaatcaagcaataatgaaacatcaaaaggaagtacagaaattaaaaacacaagttaattcattaaatagtaaatggacacgagggaaagttttagaactcaactctaatcgtgggaaagactaattatagagatttagttgacaaaaaacttggtggaatacataaaaaaatggatgatgaagaagaccttgatgaattagttcatgaaatgataggtattgatttgaaagaagttggtgatacaactgcaggagaaaacgaattcaagtcttctgcagggttcaatttagaaaatttaatggatacaaaagctggactaaaaaatcaaagtacacgacagcaaacacaaaaggaaaagaaatcatttgttgaaacttctaatgaagatgacgattttttggattctcttctatagatatttcattacttatatataagcttgttaattcataatttgactatacataaaataaacacaatttgaagaatctctacctaattgtgaaactgatattaaaaccagaaaactgtatctgtatttttagataatagtctatttttcacataatggggtgctaaagcgtcctcagaaaagctttacatccatgtcaataaaagataagcttaattaacctcgacgtttccgccggatgtaaatctcaccttacaaattttggcatatatacattcaatctgaaatcaaggaaaagaaaattgtgttcgaattatacagagactagataagtacaaataaagtgttgatttatttaccatttaaggacaactttaccactaacattactagttgcaactttttcaaatgcttcttcgccatcagtataagcatctttaatagaatcaattggaaattgtaattgacctgatttaaagagtgtttccattgccttaccataggtttctgaatgtgcaacacgatgattaattgtttcatatttggataatccaactttatattttatagagttagagatatatttgtaacttggaagaaaactaaataaactcgcttttgtgtaatcattactataactaccaccaacttgtgaaaagagacctttttcattatttgtttttaataatgaactaaaataaggcattggactttcatctctaattgtatcaacaataagatcaaatttaccattttctttgacaaactttaataattcatcaattttatattgatcacctttattataatcaatagtaacatctgcaccatattgtaaagcttttttagcggatcttggagaacaagttgcaacaactttacctgctttaaaataatgttttgcaaattggattgaatatgcaccaacagatgtaccaccacctaaaaccaaaatatttttatcctttaaatcacccttgtaagcactcactgtttgaaaagcagtagctgaaactgttggagaagaacctgcctcttcaaaagtcatacctttaggaataatttcacaagtaatagcatcctctggtttgaataaaatataattggaacatgaacctcttgttcctgatttaaaaactaaaccatagatattatcacctgctttaaattttgtctttgaaccagctttaacaacagtaccggcaaaatcacctccaataatagtttgtttcggacaaaacttcattgaacttaactctttaaaaacacaatcaatcgggttaagtgaagttgctttattttcaactaataattcatccggttgaacaatatcctttggaacaacgggaatatcaatctcttcgatagtaagcggagttttgttgttaatataggtcagcgctttaatttttaatgtatcatttacaattgggagttcagttgtagacattttcttttgttatttgttatttgttatttgttatttgttattatatactgttctatatcattatttatcttgctttcattgcaataagtgcccttcttttataccaggcattgtaactctagtaagatctgaaaagcggagatacgaatttactaattccgccaatggagttaggcactaattgtaaaagatctccatgagatatttttataataagtaagtaactccgattattcgctatttaaagcattaattagctggaacaataatcgaaaatagctgaaattgataaccccgtcattatgatgcgtgtttataaattatcaaattataccccctatacggtgccctgcggggggaataatattttgaagtttaatgtaaaacttccaggatatggattttatgatttcaatttagttattgaatgaatgtggaaagaatttttgcttcccattcccacggaaattgattgaaacttcgtatggtgtaaactttaaacgttcataactcaatcaattttcaatatttttacaaactaacaacacagttgtttgattcaggcaattttctatttacatgtctaacatgagtctgtgtggaggtctaacaaacaagaaaaagttttaaaaatcatgagtgtgagtattaggaagtattataatatatacttaggatacttaggatcagtgtatttaaaaaatataattacgtaagataataatttattagtaatcgttatcaattcaaattgtatatactctggacaatcaggattcaacttaatgcattctttctttcctttatgatctctctaataaacacatagtgcccttacaacgatgtatattccacagcgacatagtataatactgaaacagtactctaaatatctattgattagtacaataattgtactttttttcacatttcaatataaatcattcactaaacctccatttcctcatgtgcctgatattccagctcatataccattcactcgagctgcaacatgggatcctgaaacaaatcataccgtttattctaaaaagggtatagttgcatctgattctgagagatgttcaaatatgggtattaatatcttaaggaaaggtggtaatgcggctgatgcagctgttataacatgtttatgtattggtgcaactgatacaatgttttcaagtggtattggtggtggtgcatatattacatccaaaaattataaagaggaaagtgctataagtatagatgcaagagaaatggcaccaggtaatgcatatcctgatatgtttaaaggtagagaacataaaagtaaatatggtggtttagcatctggtataccaggtgaattaatgggtctttggaaactatttgaaatccatggttctggtaatattaaatgggaagaattattattaccagttgctgaattaatggaacaaggttgggaagtttcaccattatttgcatttgcattacaaactcagagacctgcatttaattatttccgtaaagattgggattttgtttttaagggtaagaatagtaatcaacttttagaagctggtgatataattaaaagacctgcatttgctcaaactttaagatatcttgctaaacatggtgcattaaaattttatgattcaaagggatatattgcacgctcaatttcagaaactattcaagaatgggaaggtttaattactcctgaagattttgataagtataatgttatcattgaagatgcaattacactgaaaaatttcacaaatgataatttaacaattttttcaccaaatggttcatcaagtggactttcattaatttcaggtttatcaattatcaatgaaatgcatttaaatgaagaaattcaatcagatataaatgcaactagtgcacataaaattgttgaagttatgaaatggatggcatcaacacgttcatatcttggtgatattggaatttacaatactaatgatactcaaataaatgagagaaagaaaagatattctaaatttttagcaaaagttttcattgacgatgttgttagtaaaattaatgataatactacacatccatgggaatcatataatccagcatttgaaccaaatgatccacatggtacatcatcattaagtgttgttgatgaatttggtaatgcagttgttataacaacaacggttaatcttctttttggttcatgtgttcatgatccaataactggtattataatgaataatgaaatggatgatttttcattaccacatatgaaaaatgcatttggtttacaaccatcaattttcaattatattcaaccatataagagaccattatcatcatcagcgcaatcaattattgttgattccgatggtaatatacaattagtcattggagcagctggtggttcaagaataactaatgcaatttttcaaggtatcgtacgtacatttatggaaggtaaagatttaacaaatgtaattgcaaatccaagaattcatcaccaattattacctgataaagtatctattgaagaaccgatttatcatcatgttattaaaggattggaggataagggacatgatgttgaaatatctaaaccacaatctgcgatgaatgcaattagagttttatcagatggcacaatgattggacaatcagattggtggagaaagtttggtgtggctgtagctctatagagggaaattttgaaattttttgtaatattgatcagtaaaagttttggcgttttttttaatttatatacttgtttctttctttctgtaatggaatagatggatctattagggttatctaaggagaatgaaagtaaattatgcagtcatttaatagaaatttctaaaattgttcaaaataagaaattacaaaaattagaacacgaaaatgaaaaattacgtgaaaggaatgaatcactagaaagagaaatactttcattgaaaaatgaacttagtaatagaactaataacaatacgaaaacaaatttaacgcaagatactatcataagtgaaaatggtaatgatgatgattccgatatgactgatatttcaccaattaaatcacaacaagaacctgacattttaattaaatcagaggcaagcacaaaacgaatactttttagtactaatagtgaaaatgaggatgaggatggtgatgatgatgataatgattcttatgatcttagtaataaacgtattaagaaggaatcgatatttagtcatataataaaagaggcaccaaagattaatttaagttcacatccctatgctaatagatcatggtatcctgaggatttcattaaaaatcctgaatttgaaagacaaatcggtgatagggcagtttcaattaattcattaacgaaacatatttcaaattattataaaagacaacaagattatatgagatcaattgcgataaaggatttcactaaaataagtgaactgaaaaattatcatgatgataagaatgaaaaagataaggatgttgatgaaaatggtgttaaattaattacaccaattcaaaatgcagatattcatttccggaataacaatatatcaccaatttataaatatgaaataaataaggataatttagataaatacattcgtgcatatccaaatattttaagaagtgataaagttaagaattgggagattgatgattcgttggaatataatgatgtttgtgaagattttctgcttacacaagaagttaaggataagaatgaaaaggcacgtgaaagatcaagattgaaagcagtatacatgttatttcattcatgttttatagttgaaaatggtaaacaagttggtaattatattttcaaaagagaagaatttaataaattagtatgtaattcaaatttcgttattgatgaaatgatttttaaataatctatagaaaaaagaaaaaaaaatataactaattaacaggtaatgatacataacatataacataacataataatgacataataataaaagacataacaaaaattatcatatatatataataggaatttactttttattttttttattttcaatatcttctaatgatttacaataatgagttaatgcaagtaatgttgggtttaaatcagctgatgaagcagatgatgataatttaaatcttttagattcatttgataatgataaaggacttgaattagaagatgacttactttctgatgaattattattgttagtttcataaaacatacttaatggtaaagttttttgaaacatttcatacgcagctaaagtgaaaccaaattgaggagatgatttacaaactctagcaacaccacctttatagaaagctctaataccttcctctgttaaaattcttttaaaagttggtaaaatacctttataaggttttataccctctattggttttgattgaattctagttttaataacatcacaaggagttgttaaaaaagctgcaggcataccagctaatgcaccagaaataagtaattcatgagggtctaaatttgatcttttaccaggtttaccgggatctaaattaaataatctttttttaatattagcataggttgggaaataaattgatgagaaaggtatatctcttaataaacaagctgtaacaccacgatataaaccttttggacctaattccattacaatttgtaaagcatttttaggaataatttgagttccactattggaaatttttgattgttgaattaattcaccttgagtttgcagtctaattttagtaacttccaagggatttgtaactgcaacttggaaaaaacctgcagttgaaccagctaaaatttcccaaggtaaagttatatcaccatttggagaatttttactaccaatacttctaattaaatcattcagagttaatttaattgctttttcaggtgcaacaccaataatttgtggtaataaacctgaatacagacctaaaataccttcatttttaactaattttgcaaaacaattaggataagaagaataaagtgaattacccttttgattttgcattctagttttaattatatcaattggataaacaattgatgaaccaatcataccagctaatgaacctaatatgaatgaatgaactgatttaaaaatatgtaagaaattattgttagttgtagtggtattggtagcagtaattggagaatttaaatcatttggtataaccatatcatctgtcagtattgctaataattctgatggatcaattgaaggatttttctttaaatgatcattagtaaatctattccaattaaaatatagtagaacttcatcattcgtgatattatgatttgatgaattaactgaggatgaattttgaatataattataaagagaatttgaagttaaataaaattttgaatcatttgaagataatttttcataagttaaataatttaattttggtaaatctcttaataatttaattaatttaagtgaatcattataatttattgaatcaccatacttataataggcgaattgtttgaaatgatttgcaattgagggagataatttattataaaaaatattttgagctatatcagttaattgagtaggtgaaatttcatcaattgaatttttatattgattaaatgaagatttgaattttaattgaggtaaattatccattaactttgcaaaagttttgaaatctattacatctttatttatattatccatattattattaatagtttcatcattaaggagggatttaaagaatagtaaatcttgagggttataattttcaacaaaggataagaaagatgaatttggtattgagaaatttagtgaataaatatttgaatctgtagtataatttggatcattgtataatttacaaattaggaataaaactttattaatatcactatctaaatctgaatttttcaaattattattattattatccttaggtaataatatttgatttgtaaatttattaaattcatctttcttcaaataacctttatgatcaatatctgaaatcataaacagtatatgaaatatatccaatgatacgaaagaagcaatttttgataaataaacgaattcattatgtttgaaaatgtcagaagaaagtaaatttgaaaaatcgggttgtttaagtactttctccgaagatgagtcaggataaaatttactatacttatcaaataaattatccattgtatatatatgatgagtgtaatagagatagaatataattaaataaacctgaagaagaagtgttacataagttaaatgaataaagtgaataaaatacatataaaaatttcataataaaacattaaaacagtcataaggttgtatacatgactattattccttatcagataaatcattcggcgtaactcctccttttctccccccgcaaattgactattataatactattactattacgtaagcattgattggaaacgagccaccgtggaatttaaatttttaactctgcttattcttataagtgaaataaatcctaatattgcaatactgataaggaagatataggtacgtctacgttgtcttaatgaaaatcttttcaaatatctattaactccaactgccatatgatatgaacctgtaattactaatgcatttaatcctgtaaatgttttccaaaatgtattttgaattgcaaatccaacatatcctaaatcaattaatgaactatctccttcaattttcaatggtaataatctttcataatatacatgtcccaataataatattaataatacatatcctgaaaatgataatggacttaatccaaataatttacttgtaattgatttccttgatccagctccaataattgaactaattccacctaatccttcatcaatatctttaacttcaatatcttcattattttcaataactcttcttttctcaattttaacttttttagaacttttaccatatttacaataattttgatatcttttcaataaattaatactaaatccactaattacatgtgcacatgtactaattaatataccaatttcaataattggtatttgatataattctctaccaagtccaatcatatcattacctgtttcaataccgaaaataccaggtgttataacaacactaaataaatgaatacttgaaaaacataaaaatggtattgttgaatattgttgaattttttgtaaaaaatttatacttttatttaaaaatgatttggaatttgatgaactatttggtaatgatattggtatacctggaattggttcaggtgcaatctcctgtaatttatttgtctccatgcctctactttattaaaagaaacaaactttactttattttattattaattaaaaatacaatttaatttattgggtgagcaataattgtctgatattgttgaactctattaagagttgaattggggttcttaaggttgggatattcgctaagctatttaagagttgaaaaaaattaaaagttatttaattacccgacttgtatagaaaatttagatactcttctaaatgggttattattgcttttgtatggtgatatttactgattttacttggataattacttaccaaatgctatagtagtaataattaatgtaaaatttgtttaaataataagatttaatttttttcaatttttatgtagtctttctaactttaatattcttaggtttaactacaaattttatgaaaaaaagccacagttttataaaatctatcaaataccccaataacactctataaaccacttacagtcacctctactaacataaaccaataaaacacatcataaataacccatacaaaccactataataaacctctataaaacaattacgtaattccatagataaggaaattttacctttcctatgagaatacccataataataataaaattattatttcaatgtttcatacttgaaataaacatctcttttctacaatctacatgtccaatgcaactaatcaatcatctgcaaatctttcagaggcagaggattatgccgattttacagtaacttcaattgttgatccaacttcctttgatccaaatatttcaccaaatagaaatcatctttatagagcaaaatctcaatcttcatttataatatctccacataggaaaagttcaataattttaccgaaaactggtgaaaagattcaaagagcttattctttttgggataaagataataaagaaaataataaactaccatctgaatcaactcccttgatatcaaatcctagtatagctatacaaccatcacaatcacctttattaaatgaattctttgaatatttgaaatcattatttactacatcaatctttaaagctgcaattgcttatttcattgcttcattatttgtttattcaccaactatttcaaatatgttaggctcatcagattcaaaacatttaacttgtacggttgtcgtttatttccatccttcaagaactgttggttcaatgttacaagctttaatgtttgtttcattttccttagttttcggtattggtattagtttattaacttttaaattaatttcatttgttattgataacgaattattatttcattcaaccaatattaaatcaccatttgttatattgacaactttaattatttgttgtacttcattaggtttaatatcgttttggaaacatcgtgtatgtaaacaaacatttaatactgcttgttcattagctgctattttaattatttcttcagttattaaagtttattcaagattattagatacaaatgataattcatcagatattgaaattccatgggaaaaaattacaagtattataagttgtgttatttgtggttgtataatatcagttactatatgtttcacagtttggaaacaatgggcaaatgaaaaattaattaattcaataattgaaattaaaattttaataggagaaattttaaatgatttatcaaatattttcatttcaaatgattgccaaataaatgatataaaatttcaaagattagaaatttctaaaaaatttaagttattgaaaagtaaattaagtaaattagattctttattagaggaaacaatgtttgaatgttttgtacttggtaatgagaaaaaatatacattactcaaacaattagttgattcagagaaaagattggttgccgatttaggtggtttacgtagagctgttgaatttaaatgggaaatgattgaattagaggatagccatgaattatctgccaagaattcaccagaacctcgtgctaatagtaatgataatgaaaatataatcatagatgattcaaatattgatatagattcggaaatcgtggaaagttcagaagaattaattgaactatttcttttccaccttgctccaagtacaaaatcttttgttttcacaatgaatgaaatattaaaagatcaaacttttaaaaatggtcaaatagatccaattgttatacaatatgtcgaaagtttgaaaaaggcaagagaattatatgatgatcatcaaaggaaggcaattgatagtttatataaacaaactattttccaaaaaaatcataatgttgaagaaaaaattaatcaagaagaagttgctgcaacatgtgctaattttgcgttttcagttactcaaatatcatcagaattagaaattttcatcaatgctacaacatcattacttcattataatgaatcaccaacaaaatcattcaattttctcaaaatttggaaaattaataaagaaaaaatattagataatgaaagaaatcaattaattgatattgatttacaaaatttgaaaaatgaaacttttagttataaaatttggaaattaacaaaattcacaagaggtgtagatttccaatttggttttcgtgttggattaggtgcttttatactttcttcattagcatttttagattcaactagacatattttcaatgaatggagaggtgagtgggcattagttacattttgtattataatgaataaatcattaggtggtacagcaatgacaattaaatggaggtttattggtactttcttaggtgcttttatagcttatatggtttggacattattttatccacatgttatattaatggcaattttcggttttattgtctcaattccttgctttaatataattttaaattggaaatcaagtaatgcatttggtagattcattttacttacatataatttaacagtactttattcatatactatgtcaattaataatataccatttaatagtgatgatgattgggaaggtggtgaaaatccaattatttgggaaattgcattccatcgttatttaggtgttacaacaggtgttatttgggcattattaattacattaacattattcccagtatctgcaagaggtagattaaagaatggattatcagttttatggttacgtatgggtataatttggaaaaggggtgcattgaaaaaatcattagatgaatataatcatgatagattggaaggtttaagaggtattaatgaatgtcatattataatgaatgaattaagattattattaaagcaagcaccaatggaaattagattaaagggtccatttccaattgaaagttataataaattaatggatggtacagagggtatacttgatgcatttgaaaatattaattcaattgttgattttgatacatcattaaatccaatcgaatcaattgttttagacaatctattcaatgaaacaaatgaattacagaatagggttttcttgatattttatatgcttgcatctgcattgaaaattggtttaccaatggcaagtgatgaaacttcaactgaaattgcaatggataaattattaacaaaattatcagatgttagaagaactgtcgagtcaagaagggaaattggtcaaaatacaggtattgaaaatgctgattttgttttattttattcatattgtttagtaactaattcaattgtttatgaattaactaaaatgatgaaagaagttgttaatttatttggtaaattagatgaagagacattagagttaaaataagatttatctattttatataatactattatttacatgtaaattattcataatcaaggccaattacttcatggaaaattttctttgatggaatttttgctttcattcttgcacataatagatatgcaccacttaattttctatgtaatgaataagtttcctctggaggtggagttaatctttcatttaacattaatttaatattagtacgaactctatcagtaattgtttgagattcaaaatcatataaaccatcattatttgactctctaaatggttcacctaaaaccataattgaatcaatatgagcttcagtcattgcatcagattctaaacctgttaaaaatcctaattcaattgaatattttttagcagcttcacgatcttccttaatagctgcacgtaaagtatttgtatatggaattgtaaatgatttatcaaattcacgacaagcaccaaaatctaataattcaattttatcagtttctgcattataaaggaaatttgcccaatttggatcagtttgcataaatctaaacttataaatttccattaaagttaatctcataatttcagctgaaattttatttttaatttcttgtgaccaatcaccttttgcaatttctatacctttcattctttgcattgttaaaacatgttcatctgataaatcatgataaatttttggaacttcaaaagctggttcattttgtaacatttccttatatctaacaacattagttgcttctctaatataatcacattcccattttaattcaactcttgcatttgcaattgatttttccagaaacataccaggtggtaaaagttttgttgaagttaataaagttaaaatattatctaaatctgaatcaattgaatctgcaacaccaggatattgaaccttaacaacaacttgatctaactcctttttagtaacagcggtatgaacttgaccaatcgaagcagctgcaattggtatatcatcaaaactagcaaataatcttgatctccaattatcacctaattcaaatgaaattgttttctctaattgatcagcaggcatataatgagcattattttgaactcttaataaaatcttttgaatatcaggtggtaaaattgaattatcttggaaagataacatttgaccaactttaagagcagctccacgcatttgagagaattttctagccattaattcaatattacgtggtgataataatagggatttcatttctggtactttaccagttttagcataatgagttgcactatctttcagaacgtgagcacccattgaagcagctaatgtaccataatgaaataatctacctaatcttgatgaaggtattggagcttgacttagtttaataccattttcagctttttctccaataactgtagcagtttttatatcattgttattattattatatcattattattattattcattttctctatttaatcttcttgatgtatgtaaactcacgtttttgcgtgcgattgggattttgattattatgacgagctttattcgatttatccattgctaatttaaagatatcaatttcagattcaccattttcacctaaatgatgtgccaatggtttaatattatcagaattaaattctctcttagcagcatttgctcttgcttgttcagatacgtttttagcttcattatataattgatcattacctctaattgattgtaaaatagtacaattttcagttacagcttccaatgactgtttgagaacctttgtagagccagcggcaacattgtaaagctggtagagggttctagaagacataattaccgatattccagtgataaaccagaatcatcctctacacacttaatcttcccttttaacagatgtcaaatattcatgtaataaaccaccctgcgtcgatgcgactaatatgttgatatattattattatccctatgttaaattcaaataatatttttttttcagttttttgattttcaaattttggaaaaaaaattttttttttgtttcattgaataagttaagttgattatttacttttaagaatctttgaatttttctttaattttgctttaattttggctttagttttggcatttggactcttctttgatcactgaaacaagtctgtcaaacaccaattatcatggatcaacaatttgttcaatcattggaaaatactttatcaatggtattattaccagataatgaagcaattaaacaagcaactcaacatttaaagaagtgaattctttaataaaacagtttctttaccttcattaatccaaatcttacaaacttctcaaaatgatggtgttaaaaaattatctgcagttgaagctagaaaattagtctctaaatattgggatgaattagatgattcaattcaacaatcaattagagattcaattttaccatttgctttcacttatccaaaacaagatattagacattcaacttcaagattaattgctgatattgcttatattgatattgaaaataatcaatggtccaaccttttaaattctttagtctctgctgcaacctgattcaaataaacaaactagagaaactgcaacttttatcttatattgtatcttagaacaattacctttatcatgggctgatcatagtggctcattcttagaattatttgcaactactttacaagataatgaatccccagttgttcaaattaatacagttctttgtttagaagctttatcaagtgcaattgacgaagatgaaactttattaaaatctttagcagctcctttctcttcattgattccaagtatgttacaagttttgaaaaaattcacttaattttgatgattcagataagactaaagaattattcactgcttttaactatatcattatgttagatatgcaattattaggtaataacttcctcaatattattcaatttatgattgaaacttcccttaataatgatgttgaacctcaaattagatgttttgctttaactaatttaactcaatgtgtctcatacagaaaatcaaagatttctcaagctcaattaggtcaacaattatcccaaactgctttacgtattgcaggtgaagaagatgattcagttgaagatcaattaaatactgaatccgaagaaaatgaaaatgaagaagaagaaccaaatgctttagcaattagattattaaatatattagcttatgaattacctccaaatcaagttattcaacctgttttagaagctgcacctgctttattagcttcctcaaatcctttcgaaagaagagcaagtttattagcaatctcagcatgtgttgaaggtggcccagattatttaagtgttcaattaccaaaaattattcaaatgatttcagctggtttaaatgatcaatcaattattgttaaagctgcttcattaaaatgtttagctatcttaggtgaatcattaaaggatgcagttgctgaacattatgaagttttaatgcaaccaattattactatcattgattcaactgataaaatcttagtttataaatatgcaacttatgctttagataccttaattgaatatatggcttcagatgcaattaaaaattatatcgaaccattaatgaacaaattattccatatgttagattctgctcaatcatcatcattaaaatcagcaattgtttcagcaattggttcagttgcttatgcatcaggtaaatacttcattccatatttccaaaattcaattcaattattagaaaaatttattgctaatatgaatgatattgaaggtatgtcagaagatgatattgaattacgtgctcaaacttttgaaaatatttcatcaatggcaagagctgttggtagtgatgctttcggtccttatgcagaacctttaatgaatgcatcatattctgcaattcaatctgataactctaagattaagagaatcaggtttcgcatttatttcaaatatggctaaagtttatggcgaacaattttcttcattcttaccaaaaattatacctgaaattcaaaaatgtttagaacaagatgaattccaaatgaacatggatgatgatgctgaagaagatgcattagctgaaaacttaaactttcgcttcaggtattgcaactgaaaaggaagtcgcattagttgcattaggtgatttagcagttggtactaaagaagcctttgcaccatttgttgaatcaacttttactattttaattcaacaaatttctgaatcattttcaattggtgcaagttgtatttcaattttatggaaaattactaaatcaatgtatgactgttttcggtaatactgaaactgtttcaaccttaattcaaaatgttagagaaaatactgcagaattaatgattgatgaagttgatgttaatgttattattacatgtcttgattcattctatgaatatgcaaaatcaatgggtaaaattgcagttattgatgaaaaagattcaaaatctttaacaactttattagaacaaactactttaattttacgtaattcacatccatgtcaagaaaaggatgaagatatgccagaagatgaagataccaatgaaactgatgcaattgtctatgactcagcactggaagttttaatttcattatcaactgcaattaatgcagaattcccaacaatttttgcagaatataaagatttaatttacactcaaattaattcaaaatctaagaataagcgtgtttcaactttaggttgtttagctgaaattactaatggtatgaaaaataataatccatattcccaagaattattagaaatatttgttaataaattaacaaatgataaatcaagtgaagttcgtggtaatgcagcttatggtgttggtattgcaattgaatttgcaaattttgatgcgtcatctgcttatccgactattttagcatcattatccaaattattaaataaagctgataaagaagcattaaagaatgaagatggtgatgatgaaactgttgaaacaattaatagaacatttgcaaatgcatgtggttgtgttgcgccgtatgacattaaaacatgaaaatgcagttccagttgatgcaatcttacctgcattatttgaacatttaccattagaaactggttttgaagaaaatacaccaatttttgaattaattattaaattatcaacaaatgaaaatgcatggatgaatgcaaatattccattaattgttaattattttgaaggtgtatttattaaagaagctgaaaaggataaattaattgctgaaagtacacttggaagagaagaaaatattgaaagattaaatcaattcgcaactgatgaacttaaagccaaagttattgaatatttaaaatggttaaatactaaatctaatggtgcagttgcagctaatgcaactttaagttcagtcattgcttaaatgctaacttctcatcttgtcactataataatttaatttaattaaataaaaataaaataataataaatttgcattttttaaatcctttcatgttttagaaatgtaactaaacatgtctacgttttactttaactctttactttttactactctcctttttataaacatttttaaaaataaaaatccggttttgattccacttacaatattttgatctatcttgaattgatttaatgttttgtttcgtcttttttttatatacagaaaaattttaaataattataaaaataacagatattcttatttctttgatcttgaatcagtgatagtgtttaataataatgcttcattatctaagtaaactctatttggagattttgacagaatttcagcaatatctttagcagtttctaatctctttaattcaacataatcttttgatcttttaattgcatcaccaattaattcagcagatttcgcttcaccttgagctttaacgaccatatattgtttttcttgaattgctttatcaacaacgaatgaagctctttgagcatcttgttgagaaatttgctttgcttcaacggcagttgaaaattctggtgagaaagtcattgcagttaatgagacatcatctaataaaaggttgaaataagcagctcttttaactaaattttctctaacaagtcttgaaactttttctctttgagtaattaattgaattgcattaaattgtgcaacgacagcttttaaaacttcattaataattgaaggtaaaactctttcatcataatctttacctaaagttctatgaattgttggtaaagaattaacatcaggtcttgataaaactctacaagagatattaaccatttgtaaatcttttgtaccagttaatgaagcaacagttcttggttttgctctaatatcataaactgttgggaattgtaagaaaggaattttaatatgagtaccttcaccgacaacttgaggtaaaacaccacttaatctatcatatataacagctctttcaccaccattaacattatataatgaactttgagcaaccataagtgcaccaccaagtaataataaacctccaacaccgaataatgcaccttttggagcacctgagcctgtaggtggtttaaatccattacgacctctaccggtagatgattttgaaatttgttctgctctcttttgcaaatctcttgcaaagttttgccagtcgttgttattcattgtgttgtttagtttacaataacagtttaaacaaaaagtagataagtcttgtataagttgtaagtcaactaattaatacaatactgtttctcgcagtaagtaaaaaaaaattgaaatttgccactgttaattttcacagtggttagcactgggctcagctgtctatctttatagtggtatataagacttattattattcttattaagtatacaatgtctatagatccatcagatatacagagagccgtttgtgatggcaatattggtattgtcaagaagttgttatcagaggatccaaatttatacaatactaaagattcagatggtagaactccattacattgggcagtttcatttcaaaattttgatatagttaaagtattacttaatccctatgatgaatgtgttgattataagggtaaaaagaatgaaattgaattagatgaaattttagatgattcaaattggaatccattacatattgcagcatctgcaggtaattttcaagtttttaaattattagcaactcatataccattacctgatattaatttacaaacatcaacaggtcaaacatgtttacattatgcagttagtaaaaataattatgatattgttgaatttttgataattaatttaaaggcaaatgttagaatcaaggataagaaaaatcaattaccaattcatagagctgcagctattggtagtgaaaaaatggttcaaatattagttgaaaatggtaaatcaccattagattttactgatatctttggtatgacagcaattcatcatgcattagctgaaggtaatgcagatgttgctcttcaattggttaaatatggtgcctgattggagaaaagaaacaagttcaggtgaatctacttttgatactgcattgaatgaaaatgtacgttcctttttcaagaggggacttgtagaagctggtgaattagatgaacagtaaagttgtttcactaaatccggggtgttttagtatgtaaatctaataaataatatcattttaatatttgaaattacagtttataacgaattaatgacatgcaatcaatctaaaattagcataaaaggaataaagtaagcattcggaaatgttctttaacctaatgtatttgtttcataacctatcccctctaatcgataagtaatactatggtatcatcaaagtttaaactctaatttgggtgcatgtccttcaaaacctttcccaggttggtacattcgctagccacactttatacttgtataacatagcccgaatggaatagtataaatatagatgaattccccatgatatttccacagttcttctcctcattctattttatttcttttcttttatcaggaacaatcgatccaaaacaaaaaacaaactaaaacaaactaattaattaaaaatgtctgacgaaggtagaaagaatttcactgataaagttgcagaatctgttaaaccagaaggtgacaaatcattatgggacaagaccactgaagcagttactgatgcttacgataaggttgcagcttcattacaaccagaagaagataaatcattatcccaaaaagttggtgacaagttatctgacactccatctaacccagcaaagaagttttaattgatttaaaacaatgttacttttattaatcttacggaaatgttatgtctatgaagttatatactatataatatattgtataaacaattaaaattaaaattattatcttaaactatcctataaagcagtagctgtattaattgtttaattgtactgatcttatcaataatgcaagagaagtatagaaaaggttgagcccccttcttatattttctcggagataagacgtcacgtgacaatgtccggatttaaaaaaaataaaattttaattgaaaattgaaaaacttctagaataatctcctcaaaaaaaaatttaaatttttcacttggaacatgaattattaatcatcgattttaacttatttaaccataaaacatccacttcttcttaattttgaaaagagaatgcaaaataacgaaagtgatcatatagataaaaagcaaaaaattatgtcacaacaagaagaacaaaataatcaacagcaacaaactcaagaagagttttttcaaaccagtcggtgaacttgcaactgaagcagataatgaatcaaataatgatcaagaagttgatgatcaaggtttaaggaaaacaggtgcagaagatgctcaaggtcatccagttcaagaaattgattcattatgtatgagatgtggtaaagatggtgttacaagattattacttacatcaattccattttttaaacaaattgttttaatgtcatttgaatgtccacattgtcattttaaaaatagtgaaattcaaccagcttcagaaattcaagaaaaaggttcaaaatatatgttaaaaattgaaaattcagaagattttaatagacaagttgttaaatcagattcttgtacttgtaaatttgttgaattagatattgaaattcctcaacaaagaggtcaattaattacacctgaaggtttattaactgaaatgattgataatttaaaaattgaacaacctcaaagaaaatctttacaacctgaaacttatgaaaaaattgaagaatttattgaaaaagttcaaaaatatattaattgtgaagaaggtactttacctttaactttaattgttgatgatcctgcaggtaattcttggattgaatatgttcctggtgaacctcaacataaatggagttgtacatattatgcaagatcacctgctcaaaatgttcaattaggtttaatctcagcggatgaagttgctcaacgtgaaagagaaatttcaagaattaaaggtgaagaagctaaaaaattagttgaacttcaacatcaacaaaccgctgaaaatttagaaaatgataatccaagatcaactggtataataagtgataaatctgaaattgaaaattttacaaatgaagttgaaacttttagagcaacttgttcaggttgttatgcaccttgtgaaactcatatgaaattagttaatataccacattttaaagatgttgtcattatgtcaacagtttgtgataattgtggttataaatcaaatgaagttaaaactggtggtgaaattcctgatcatggtacaaaaattcaacttttatgtgatgatccagaagatttagctcgtgatattttaaaatctgaaacttgtggtatgtcaatacctgaattaaatttagatttaactcctggtactttaggtggtcgtttcacaacaattgaaggtttattaagacaagttagagatgaattacattcaagagtttatactcaaacatcagattcaatggctcctgaaactaaaaatagatggaatgtattctttgataatttagataaagcaattgatggtaaaactaaatttacaattcatatgattgatccattatcttcatcttatattcaaaatgtttatgcacctgatgctgatccaaatatgacaattgaacattacccaagaactgaacaagaaaatgaagaccttggtttaactgatatgaaaactgaaaattattaataattttatcgtgtattttattggttattataaggttttagggtttatttagattttaatattcttttttttttctatataatgtttctaaatgtgtaaattatattataaatgtttccttttgataaagtcatcatcaccgtaccgtcttcttcattatcgtaattataaacagcttccttaacttgatgcccctttttcttttccttatcggaatcatcatcctcatcatcatcatcttcaaccactattctatgttcagtctcattcagtaagctatttctctttctagtttcataaacatcactaaatggatttctactactctgtgacataactctgtacaaattattattgaaaaatggattattatcaagcattataccttcttcgtcattattattattgaaattttctagtaacttatccattgatatatctgcacctttcaagctgtttctgaacttttgttttatcttttccctttcaacggcattaggcgcatttttgatttgattgaatatatcacatttctcaacaaagtatttatatcttaatcttgtaaatgtggttttaatacttgccaaaactttggtttttctaatttctctattaatttccctaatcttagttgaatgttttaagaaatcttctaaattcaaacatgtactatcatcaaatcttgaataataaccaataatcaaaatagcatccttgaacggaatttttctaactggagcagcatcaccaaatttcagaacagttgcagcttgcagaagttcaaaaatcatcttatcatatcttcttcttcttttacgaatttctgcaaaattgattaatgataagatatcattcagtttctctaaatcgattttaaaatcatatccattataatcattatatttgaataacacttcattggaaattttttgtaaacttaaaccacttggatagacatgatatgataagacaccatctaatgaatgtaaaaattttaataaatcattctcataaataaaacctgatcctgtgatatctaattcattccatgccctttttaaactttctaatttcatctctagtgattaatttatgtggtcctgatccatgataaacataactgaaattgttaataacaacagaaatcaaaatattcaagaagatgtacattgacaaaatattccaaacaaagaataaaaacattgctaatgcactatttccacaatcactattaccaaatccacctgcaaaacaatcaggacttccaatcataaagtctcttgcaatataattccaaccttcaccaaaactgtttctgaataacataatcattgcttttgtaacagttcttgcatttaaattacctgtagtattaggtccaagtttagtcataccaaacaattggtttaatgcaatggcaaaaaccaaaaataaaaccaaccatgtatacagtaaggtcatcaatgaaaataaactagcagaaccatatttaatcaattgatttaatgcatcactttgaggtataatcaaaatcaaaacagaaaccaggaagaccttataaatattgtaataaatattttgcagtgtatatttcaatgaaatgcacgacattataactgaagaaattaagataatcgtagttgcaatattaaacttatttgagtaataaactttgaaccctgaacaatattgaaccaaagatgaatgaactaataaagtaaaacttgtcactaaatacaaaacatttctaatcattaacccattacgtaaatcaggatagcattcagaaagtagaatcgcaaaatgacacaaaagaacaacattcatacactttgcccatttacctctctttgcagtaacaatcttggataatttaatttgaaaatcactcattttaccatcatctcttcttcttgatggtctaactttactcaatacttttttaatttcataccaaccatattgttcattattcaaaaaagccgtacctgtttgtaaggtataattattaataataatagcaataaacaaattgataataaagattgtagcacaaaaaatgaaaatgataacgaaaataccatttcctggagattgaaatgtatgtggttgttcaccataatcaccaatattcatcacatcacctaataaatcgacccaaccttccagtgacaaaatttcgaataatgtttgagctgaatcaccaaaatcatcaaattgaagataaggtgtatcaatataatttgggcttaaaatattccagttaaaaacttcattttcgtattctaaaacacattcacctaaggcggattcaccgtcaatacaatgagataattcattactgaagatattcaatccccataatgcaaatggtaatagtaaagatagagaaacgaatgctgctgaaaagattttgaaaaatgctgaaacaactgcaaaatgaaagaccatttgagattcattggtaatggttaataaacggaaggctctcagtgcctttaaagcaccaaatgtgataactgatgaataattattattaatagttgatgaaacagtaatccaaaaagaagttaacacaataaaatcaagtaaattccaaacacttttgaaataacttctttcaccgaaaaacccatccatcggcaataattttaatgacgaactcaatagtaaaaataaccatgaaaacaatatcaggaacaatcatccagttattttttaaatcgtcaaatgagttgacttttctatataacggcgtttcgtaacatgcaagaacaacaacaacaacagaggcctaaaaacatgaaaacattgaaaaaatataataatttaggtgatggttgtttaccttctatacgtggtttcactggtgttgtaagtaattgacaaaatctacggattggattattattggtaaaaataagtaatgaacgatcaacattttgatcagattttacccattctctaactttccttaacactgattttctactattcaaattctgaagttctctatctatttcatcttgaggatcttcatctaatacttcatttatattttcaaatggatctaacggtatcgactcggctggaggagtattgtcaattaattcctttggaataggtctacctaatagtttcaaatatactaaattaaattcatttttagtagatttcaagaacgtaaacaagtcattaatgtataaagcttctcttagtctatatctgaaaagcttaaatttttttgaaaattttctatcgtcgtttctttccttgatatagtcattgatatttattttatcatatccattcattactaaattttcattcaacttatttaaaaagaacattgcttgttgagattcaacatttctatcaaaattattcttcatcaaatcaaataacccgtcagtattgttattattttgaattttatcaatacatgatctaacaaattgctttatttgatttaattttttctcagtttcagggtaattccaaactacctgtgataatagcaatgaaaatacccattaaaacagtattagagaggataaaccaaaaaatcaatgctgttgcaatacagattgtattgaatgtagatgttgagtatgcttcaactgtatataaaatgtcagaccaattctcagtagttgtaataatgaataatgaaacaattgtgttaggtaaattgtacataatccatggattatctgacatttcatcaacagggaacaacaccttccacctaatcttgcaagtatgatactaacaaggtataataaaatcataccaaatacaacaagctgcataaaagagtttaattttttcaaagctaacatccaagcatttctcaatggtttaataaaatgaataactctataaaatctcagtataccaaaaattgaaagccaaccattgttgactgatgataatgatttataaacgggtggtaatgacagtacaaacgagaagatagcaatggataagtcagtcaagttgaaaattgagtaaaagaatacctgtggatttttttcaataataaaaaatgtaaacctgaaaacaatttccaacattaataatgaggagacaattagatctgcagtataataagagctgtttaaaacaccattttgtcgagttttagtacaactataacaaaaccaaacaatgatgagggtaaccggtataatttcaaatttgatcaaatgctttaaatacttggaattactgacaaaatcttcatattttgttttatatttattcaaaaggactattttttttagattgtagattttccctataagaatgaataataactgcgataaataaattaagtaaccagacaaccaaaatgaatattgaaataatgtaaaacaaagcagctgccattgaatcactatccattgtataatacatcaaatctgtgaaagtatttgctgaaataataacaaaaacggactgcattgattgaacaatattatcaaacgaaactctaccattataaggattctctccagaaatgcattttgaattaactggacaagtataacctttagtagtaaatgaggattcaccatttggtaatagataaggcattgggtttttattttcatctaaccaagaaccacaaaattgaaattcgtgtagaaaagtatctgttgaattatttggattttcccaaacacaatgacgtctaaatgaagatttaaacgattcaacaccaataattgataataatatccaaaagcaaattaagaaaatccaaatatcctttgattgataagcagcatttttaagatttgctaaaattcttcttgaaaatgatgacaattgataaaatgtgtaatatacgtaaacacattaaagatctgaaaatttgagctttagctgaatctgcaaatttaaatgctataaagaaagatacccaaaatgagattattgaaacaaaatctaatctattccaatcggttcgtaagtaaggtggtattaaataatgagaaagtttatgcttccttctgttaggtatcatatttaatattgagttttttaaagtacttggttctgaatttgtgtcattgtttgaattaatgaatggaatatttggaataatgacagaagttacatcaattgaatcacttgaatctgagaaataatcatcaataatatcaatattaggatcaatatttgatgatttatctgataattgatctaataaatcatcaggaatatctttaggaaattgaaataaaccataagcaactattttcatgaacatttcaactgtataaatgatgtaaaatacaactaaaatccaatctacccaattataacctttggcaaaaacgtaaccattttcgaatttccaatgttgataagataataaacctatttgaataagtaaaagaattgttaagaatatatgggtatatttaaatgataaaattttatgacaaaatagtcttaattttgactttggagagaaaaatttaagagttttccctaacaataatttattcttatcaaattgaggttgatttgaggatggagaggtataggggctatcagtgtttaatgatgaagatgatatattttgattattaaaattattattattatatgtcgtattattcgagatattatttgaatcatttggtattaataggagtgatacagcatcaggatttgataatgacatatttgaaaattcagctgataaattatttgaaattgaagcagcatttgaactatgattatcatcatttgttggcatccatagagataaatcatcatgaaaatcgtcgtcatcataattatcatcatcagtactatttaaattagtactaatactattattattattattattattgatatttaaagcatcattactactattattactaaatgaggatgaaatatttgaaacgttactgttattacgactccttaaagagatcgaaccacttcgatctgttggagctgtaagtaatattcgaggaggtatatccatagtatgttatgttgtgttaaatgctatataatcattgcaaagaaaagagtagaagaagaagaagggtatgttaaattataaaaaagggggagagaggaggcgttttcccattaatgagttaagaagctgagccagttgacccattggaatctgttgatattgctgagcctgcagagtcgcgtcggtagtatctccagggggtatttgttaaattgggggtggttctctccttcagtgggtcataggaagagctgtattctttctcatatggaccatgggatgatgagtacataggtttagaatatgatgatccagtatttgcaccgtataatgcattattgtgtgttttcttgcggtctcgagctaaccaacgatcaagaaatgatgacattgttgttaagtattttgttattgattgttttgttaagtatagtaaaaaaaagtagttatagttatatttacaagggtctctctctatatttatacgtgttaagataagataagatagataagggaaatcattaaatcatcatcatcatcaccagccagtcccttaccaacatttatagtagttatatgttatactcacactactgtttcccctccttaagtctctcttgtttctctctaataaaggcgtcacgcacttcatcaacatatttatgatccttgtgacgttgaacacattccctcattgcatcaccctgtttcttacatttaaataaaactccaaaacctgtatttgcttcacatttcttaaattcacgtacatatggatcacatgcttcccaaactgcaatttgaaatctttcaataacttttttctcctctgcaggtgttaaaacccatgatggaagtccattaattctctcctttggattactatcatctaaccaccccatatcttattgtattgtattgtattatgctgtgtatataatataaactaaatgaaataaaaatggtgtccttagtattaacagtagtataaatttcaatttctattacataataaaatcatttttcttttcctcctcttatataagtaaataaacaccctttatttacatcaaattagagaagtgactacattcccgttaagcaatgtcatccatagctgaaactgcatctttattagatcttaatgatctatcctatattgatgcaatatctcaaagaattttacgtttacaggcacttcacaatgattctttaacttcattacaattatcaattgattcacttactagacaaaatgaaaatattgcagcttcaattaaatcaattacttcaagtcaacaaacaaagcaaactcgtcatgatctgaaaaaacttgaaaatcaaatctttaatacagctcgttcaataacttcacttaatatgcaaattaattcattaaaattatcttataatgataatttgaaaaggcttagttcacttcattcaacaatttcactatttcaaacacctcaaaattcaaataccccaaataatttaatttataaattatataatgctacaggtgtaagaattgttaatgatgaagttgtaatacttaataaacaatcaaataaaataagtactctttcattagatgatagttatagtgattatttcgtttcaaattttatatgggatgctatataacaagattttatttatttaaatgatgtatttttattatgtttgtatttataaataaaactaatagttttcaggattttcacgtaatgataatttagtccattttggtacaaaatgagcaccttttctatatcctcttgaatgtttattaaaaactgtatatttatcccttggtaacatttcattttccttcgggaaatttaattgtaaattagtaatttttttactattcataccattttcttgtaatccttcaaataatactctaatattttcatcaactgtttgcatacgatgtctttgtcttctcttttgtggtgctgataatctccatggtttcttccataataaaccagatagcacgctgcatgtactcttaaatgctccaatcattcttaccctatactataaaagaaagaaagttatatattgattttccaacagctgtataataatgcatcaattatgaaaattcaacatgctcaaaaaatttctttcaattcatgaaatttccctcactcaataaccattaatccactctacctgtactacacttcttttaaccaaccacacatataatgaatgagaaaaccttcacagcacttgttgaatcattagactcacaatccccacttcctcaattacatcctcaacctagaataatcataaatggtcaaccatttggttctcaagcagattttattcaattatggaattctttacctaattcaaatcatcaaataacttcatatgatactcatcaaatacctggaacttcaactcatgtagtattggctcatttaaaggtaagatttgatgaatctggtaaggatagatcaggtcaatgtacttcattaaatactcctgcctcatcaattagatcaatttggagtcattggtttggtgttgatttatcttgtgttgttgaagaacaaaacggtcaaatattggtaaatacttggaattatagatttgctgaaaacccttcatccactatctataaagtcatatagtttgactttttatgcatctttttactattgttttattaatattatatcattacatgtttcagtttacttcttttttgaacactttttttcgtttttggaccttttttttctttcttttttggacttttttttcttttcttattaaaccctaatctctctatatttcctttctatagatttctatataattattttaattatccatggtttactaattacacatacaatcaataaaatcaaaacagtaagttgactgactatattgaatatttctaaaatcattcctttggaaataactttaattccattaattatgttcaattgattctcttcaatcaatttcttaatagtaataatataaccaatttcatagataacaccactaattttcagaagtaaattcactaataataaaaatccaatcattttaattataatattgattatagtaattgaaatggaaaacttatcactctcttcttcacggtatttcttatcaaataaatattctttaaataaattcagttttttgttacattcatccttgaaataaattgtgatgattatactcattaataaacacgtactttcaataacaattccaataatagatttaattgaattcatttcaccgagtaacaaacttaaatatccatacattaaatatttattgtctccagtatgtaggtttttaatcataacttgatatttatcaacaaataaatttgaaatgtattcagcatctccttcaatttccatagaacttaatgtataaattaaatcttttaaaataacaccaactaaatcagtacctttacccttagatatcaaatgacattcactaaaggttgaaacaccattaaacatttctttacaatatccgaagttactaattttgaaaataatgtcattcttattattaaaaatattatcaatactctgtttgatcaaatctttattgaatgacgaatctaaaattaatcctgataaaccatttatgattgtttcaaatatgtcactaacttctgaactgattctattaccacctttaccaactttttgcatttgaaaaatgttaaaacctgtaatataattttcctttccagaatgtttgaatttcaaattttggtaaacataaaccttctttagaaatacatgacatttcacatataagacttataataggacaagcaaataaaatcaatgtgattaaacttaaaattttgaaacttttgaaatatgatttcattataatttgttttcgtgcaataattaatctttctgtgctaacgctcgttaaagggttatacttctccttattataaagatcattctcactgctaaaacaagtgcttgagcctgagtttttttcaataacagtacgataatttgctgatccagctgcaaagccaggtctgattgcatttttattaaatgttacaggattattcgttttaaacatattgtctgatccttttatgaaagggtttctaattccattaaaaatattattattattatcaccaccactgttttgtttatagctatttgaatgggtatctttactattcattgaatcaggatctttaaaatattctggcccatcaaattccaattctccataatcttgatattctcgataatctccatagtcgccactgttaggtgatgtactaggagcaaacataacagcaaagatctatttgatcagatgaatgaatccgatgtattgttatcaatggtatagcaaatagggatgtttttttttatagatttttgccccatgaaaataaaaattttggaaaatttaagggggctcagtccagttaaatctctctttcagggcgttcctctgtctagtcttatgctgggactcctttgtatggtgctactgaacttaccatcttcctctccgggaggcattatgggggttagtgggataaattcttcactttgtgaaagatcaatgttcaaagcagtcggtgcttttcttttattaaacagttgatctgatcttaaaaatgtaatgtttttaacgattggttgtttaacagacacgtctgtctctgataatgaatgtctatgttctaaagggttggtgatggaagttattgttgattttgtatcttcaaaaatgggtatctcaaatgtacgtgtttgatttctatttttatacatatcactttcaaggtcataatcttcactgtagtctacatcttcatcatctacttcatcctcttcatcatcatctttattcaatgcactttcatctgcatatctataatcaaattcatatgcatttaatggcagtggaatttgattgttttttattttcttattattagtcgatctactaaaccaaacgggacccgcccatagacagaaaagaataattgtgaaacataaccaagtaactgaaattgaaataaatactttaccaaatgtcatattaattccgtaactacctaattgattactaacactactttgtattttagaaagttgaactactaaaattgcaaatgaaaaaattgaaagtaccagattagaaaatgttaaaactgccatataatttttaatccataatgaaatattcaaatcatccatttcattacctctcattccataataaaaaaatgtcgatataaataaaattacttgaattgctattgttgttgttaataaatttacacttgtgttggctagattatcggttgaatctaaataatttgaataattaggatcacttgtgaatctcatagtagcatcatcaacagttgtatcaacatcttgactataagcatatgataaaataatattaaatccaatagatgccaattgctgtcgataattgaataaaccaaatttattccctgtacaagttattgttttattttgcatatcaatctgatcatttatctctaaatcattaatataatcagggtcatcactatcaaacgtaaatggaggatgataatacttaacataacaccaatcattcaacccagttctgatttgttcgggtgtatcttcaatatgatcttcaatataattagttatcagtttcaactctgacgttgtcataaaattatttgattgatctgacagttgctttaatgctgtaaataaaccttgagctaaatctgattgtttagtatttaaaacatataatggtatatgatttgctttagatccaagtaatgtacttccaagaattaatgttaataataaaatgacaattcttaataaaaatataactttagctcttttactcaaattaacaaacggtagttgaccgtagaattttatattggtccacagaatcatgtctgttagttaaattccaggactgttttgtctataacgttccttttatgcttatacgaaaaggccaagcaaaaagcaatgatgattaagagcttcgtataaaaaaataaataatcacgaaaaaatataaatttctaccagtattattatcaccatccctttcaaccttgtgatggagaggttgttgataatggtaacaaccacttgtttatcattgaatgtgatattctaatttttagttatggtaataacttgtagtaaataaaataactgtattatatcgtacataatcaaatatcaaattgtccattattattgcatgtgctaagctatagattcgtaaagcttaggaataaaatttcacgtaatcgcattttgaagattaagttgatctcttcaagagaaaaggtttcatttacaagaaggagtaaatggcaacaactcagaaagatatagttggatgggaactagtctttgatggtaaagcaggacgaagacgtagtcgtaaatcggatattcatattaaaagaaatagtgacggaattgaaataaaggaaggtgattgtatttcattgaaacacgaaaatagtaaatttacagtatttgcattagttaaagatattttacttgcagttgataagtttttagaaattaaagtattgctatttgttcaatataatgaaactttggacagttatataaagcagaagtcaattgatgaaaaatacacttcaaaagacttatttcttacgccatttatggaatcaattaaaatcgttaatatagttgataaaatcaatgttgtaggtatacgaaatataaaggatgaactgaataataatacatttgtttgcagaagaatatgtgatgaatcaaacacacatttcacagatataattgattgggaaactatactagaaaatttcaactctaataaaaatgaatttttcgaaactgttaaattactgacattaaatacatcagccaattcggctcactcaagtccttctaagaaaataaaacagacagctaaaattgaaaaaataaaacgaattggtatcatttatgatgaaaagttaataaaagaaaaacctataaagaaaagtcttcaagatcgtattacttatattgacgatcatgatgatgattctgtagaagatgaggatttcagtgataatgaacaagatgacgatgatgatgataataataattccagtttggatgatgaagaattaagttctgttgatgatgcgtctgacgatgaattttacggttatcaaacaacaacaagtccgacaaagagaaagagaaagaaatctattaaaactaataaaaaatctagaaaatcacgtaaacaatcagatgatggaatggatgatgatattgattataatgcttatattgaacaagaaaatttcgaaatgattaaaggtataaaacaagatgatgaaaaatattcaactactaagatgttaatgatggctaagaaagttttaggtacaggtactaaattgagaacacttccttgtagggatgaagagtttcatgaattatataataatttagaaggatgtattaaatctgaaaagggtagatgtatttatgtcagtggtacccctggtgttgggaaaactgcgactgttagaaatgttattgaacaattatctgctaagttgactgttgaaaataaaggtaagaaagttttcaattatcttgaaattaatggattaaagttagttagaccacagcaagcatatcaagttttatggaagaaaatatctaaaactgcaacttcagctaataattcgttaacatatttacaacaatattttgaacaagatgaagagaatgaagaagttgatagaaaaaaggataataagagtagattaccattagttgttttattagatgaattagatcaaattgttacaaagagtcagtctattatgtataattttttcaattggccaacatatgaatattctaaattaattataatagcagttgcaaatacaatggatttacctgaaagattattaacaaataaaatttcaagtagattggggttatctagaattcaatttacaagttattcatataatcaattaagtgaaattattaaaaatagattagaaacattaactacacataataatcatttattaattgctaaggatgcaattgaatttgcatcaagaaaagttgcatcagttagtggtgatgcaagaagatcattaatgatttgtattcgagctattgaatttgcacaaaaggaatttaaacagaaaagtgcagctgaaaagagagaattagatggtaaatatactgtcactattatgcatattatgaaagctattaatgaaacctctaattcacctgtatcatcatatttggtttctttaccattcattaataaattcttgcttatttgtttgatgttaagaaagaaacgtttaggagttgctgagattaaagtaggtgaaatttttgatgaattaagaacacaggcacatacattatcatttagagaaatcaaggaaaaactgaaagctgataatttaacattatttgatatcctatttgaagataaagatgaaagaatcatcaagaatagcttcttatattttaagaaattttgaagatagtggtatattatttatgcaacatttaagaaatgaggaagagagaattgttcgtcttaatataagtgatgatgaaattatcagttgtttcaaaagagatgataatttaaaggaactcattgcctatgtatagttatcccttctgataatcatatatcttggtataatagaattggttcaccagtatttgtaatttctggtatttttaaacgtaaatcaaaagctttacttataactattttaaatattttttgaatattaattgaagcagaagttgaactaaatattaaaggagcattcatagctgaagcgtattttttagcttgtttagtaatttgatcttgttcctcaattggtaattcgatgaaaacatcatatttagtaccaactaagaaaggtattgcagttctattaaaaccacgagtttgtctataccaatctttaattgaatttaaagttgattttcttgataaatcaaacataaataaaattgcaactgcatcagttgcaacaagtggtaacatatttgtaaattcactttcaccacctaaatcccaaattgagaatgtaatttcagtatttttaatattaattgtcctttccataaaattaacacctaaagtttgagtataaacttcatcaaagcaattttcaacatatttaaccattaatgaagttttaccaacctgagcatcaccaattagtccaacctttagtgtgatattatttttatttctatgagaggaatgatcttgttcatccattgttgtttataatcgatatataagattaaacccaatctattcaaccgtgaaatgatatcattaaattcatgttgctgtagcgtgtttctaaattttgaaaagtaaacaaacgtaatattacgtaatgtctgtatcacgtgacaattttttctaaaaataccattagaggtctaaggagtagctacgtaccttcctaattaggaaatgcagcgaaagaatcacacacaaaaaattttctctctctcataataaaacattttttcacagtcacaaaaaaaaagagtgggcgagaaatctggtaatttacagtggtgaaaattcaattttttttcctactatgggagagaggaatgctatactggtgatatagtgggttttctctaattttcttactatacattttttttttcaggaattatactagtattatttcttaattgcagttataatttttttgtaatattttgttacttacatttttactttaatttcattttaatatccacaaccccatcatggcaatcggtaagaacaagagattatccaaaggtaagaaaggtcttaagaagagagttgttgacccattcaccaagaaagaatggtatgatattaaagcaccaactacttttgaacacagagatgttggtaaaactttaattaataaatcaactggtttaaagaatgccgttgatggtttaaagggtagagttttcgaatttaacttagctgatttacaaggttcagaagatcatgcttataagaaagttaaattaagagttgatgaagttcaaggtaagaatttattaactaacttccatggtatggatttcactactgataaattaaagtcattagttagaaaatggcaatcacttgttgaagcaaatgttaccgttaaaactgctgatgattacgttttaagaattttctgtattgctttcactagaagacaagcaaatcaaattaagaaaactgcttatgcacaatcttctaaattaagagaagttagaaagaagatgattgaaattatgactaaggaagtttcaaactctactttagctcaattaactggtaaattaatcccagaagctattggtaatgaaattgaaaaggaaactcactcaattttaccattacaaaatgttcatattagaaaagttaaattattaaaacaaccaaaattcgatttaggtaacttattatctttacacggtgaatcatctgttgattctaaaggtaaaaaagtttcaactggtttcaaagatgttatcttagaaactgtttaaatttaatttaatttttaaagtttttaattacttctatatcttactatataaaacaaccatctaacaaataatttgtttctgttatattactctattatttattattacgaaaattattatattaatatactgtatctttatctagcaatatttctattcctctcttagatcataataggaggtttctaaattgaataattttacagtgagaatcttgttatgagagaattattatataacatgacccctaacaacctaacaattaaattatacttaacaaaagatttgaatattaaaagattatatcagaaatacaaaattttgattacttgtttaatagagaaaatacaaatttaactatagatgtgataaatttaagactttacttaattgtgcagtctcttttcataagagtataagttatgaacaccaccttcaaattgagctgaaggagttctaaattcaaatctaacttcaccattcataacggattctcttaatgcatcaacagatttaacaccaatatcttgacatgaatgttgtaaaccattataaatatatggaataaatttagtaattgaacctttatctaaaactgaacctgaaacaccttgagcaactaaaactttatcacccttcactgaaatatcttgaagttgaagcatttagcatttgtatcagttttttgcattgcatcaattgaacccatacctctataagtctttaatcttttaccatctctaaagaaataatcaccaggagattcagttgtacctgctaacataccacccatcataacacatgatgcacctaatgctaatgctttagtaatatgaccaatattttgaataccaccatctgcaatacatggaaccccaaactgatttgcaaattcaggtaacattataaactgctgtaccttgaggtctaccacatgccataacttcttgtgtaatacaaattgaacctgaacccataccaattcttaaaccatctgcacctgcattaattaattcagctgcttgttctcttgtaacaacattacctgcaataactttgtaattctgggaaggtttcttaataaatttaatcatatttaattggtaaacttgaattaccttgagatgaatctaatgacaacaacatctaaacctgcttcaactaataatcttaatctttgtcctatctttatcaatagtaccaattgatgcaccacataataattgtttagtaactggaggattttgaagcatgaggataatcttgatttttttgtaaatcagttcttgataataaagaaactaagttgccttctttatcaacaattggtaatttaccttttttagaatttcttaagatgtcattaccttcagataatgaaacaccaacttgtgcagtaactaaatctttagtcataacatctgcaacagttaaggttaaatcatcaaggaattgaacatctcttgaagtaataataccaactaatttaccaccaattaaaccagtttctataataataaaaaataaagagtggagatgaaatgttagtaaaaatgttctcaattgaagattaaaatattgatgttcccaaattttgaatgaagaaaaaaaggagaaatagagaaagaagtagtcagagaattaaatttttttccacaagatcgtttgatcgcaatcggtagaacgaaagttataaattttgttaatcatcatgtaaaaattcttctttttttttcttcaaaattgataagggaaattaacacatttgaaatggaaataaaacataccagtaacagggaatgaagtaaaacctaagttttcactcattttctttgcctcagcaattgtagttgaaggagagataacaacaggatcattaatgaaaccattttcatattttttaacttttttaaccattgcagcttgttcttcaccggtacaattatgatgaataataccaataccacctaataaagccatatggattgccatatctgattcagtgacggtatccataggagatgaaacaaatggtgcctttaaagtaatttttttagttaatcttgattctaaagagacaattgaagatgggaaatcaattttacctggtaaaactaagaaatcattataagttaaaccaccattaactcttgaatccattaattcagagactgataaaccatccttttgggtataagtttttaagtgagcaattgcatctgaagtatttaaataagcagacatcctgtttatattattatattattaatttagtaaagattacttatgtaattaagagattacagtaaattaaaataaacattagaagagattaaaaaacccgacaaattaagagcaaccaagccagccagtaaatgaaaataaatgaaaagaaacgacatgagaaaaggaaaagggagcattttgaaataaattgagaaagtcaagtccttttatacattgtctgtgaaaaattattttttttacaaaactttaataaaaaaaatttgagaaaaacaaaaaaatttaaatttttttttcttttttttgacttctttgtgtaatgattgataatactgattattattattagtaataacactgtttacgtaatacgcgtattatgacaattggcttgttgtggtgttttaataaattttaaaaaattgccccgtttaaattgttatcttctcaaaactgacccaaaccgatttgattgattatggacttctaccaatttttcatacattttgggtagagaagtacatacttcttacacattacattacaatggactctcctagagataataaacagtctcgatatttccaattcttacaatcaaattcaactttagactcaatatcaccttctcaatcaccaacaaaatcacttggctcattaaaattagataccgatatttcaaacatagataataataatggtagtgtgaacaattacagtcctttaaagaatggttttatgtccaattctgctcaattgagtaattcctcttctcccactctgaaaattaaaagattttcttcacaaaattattataataataatagtaacacaacaacaccttcacctactaaaagatttaacaaaaatcgtttaaataatatagaaaatagagattattcaaatgattttataataccgtcaccctcagaacgtaagaattctaattggggagatttagaggatttatcacagttagaaactcatgatagtcattcatcattttttaatcaaccaatgttatcccccattgataactcacctagaaacaataacataggcaatagcaatagcaatttatttgactctcctacttctttatctaaatccgtgtcgaataactctttcaatggacaatcatctcctttaatcaaccgtttgaaaaatttaaattttacttcaactcattctttagaatcaaatataactattggatcaattaatacaacaaatgcaactgcaactacaaatacatcaataaaatctttaagaaaacaaccttcaacttcttcaatttttacaaaattaccattaaatatgcaaataattgtaaattcaagagctaaagatagtatacatgatttaaataatttcgttaatttaagttatgcagaattttgggatttaacccctgaggaaggtaaatcctataaaaactggaataagttagaatttgaaattcagtcactaatatttgaaatctttactaatctcaaaaaaataaaatttaatttacatagacttatattcatttatggaactgaactgaaaaatactggtataatatcagacactgtatataataacacttttgaagttttagctgaactatatcattatttaactaaattcttggtgaaaaaattaaaaccttcatttgataataaatttttcgttaatgatactcatatattaaaattattaacccattggtttaaacaattaaatgatcaatatcaacatatatcaagctcggcagtttatttatcaaccatatgttcaaatgatgaagttaaaaaaattataatgaatatctcacaaaatgatcaaagtaatatatcaaataggagtgcagtttctccaattgaattgtttaactcctattttattaaactgtttacttccatccaactattgtttgatagattgaaatctttatataaagaagacaataacttaatcaattatgaattatcagataatttagaaaatataatcaaaaaaattaataatataagtgattcaacatcagagttagaaaagaaaattgctttcaatgaaaaactatcttataaaactgaaattaatttttctcatatggaaatggttaatatgtttgatgaaaataggaaatcaagagaacctttgaaattagaatttaaatcacataatttattatggtctgattctttaattgctccatttgataattatttggttattttatcaatcaaaaatccttcaactttaaattttttatctaaagaggaagaatatattttatccaaaaacccaatacctttacaatatttatcaattgatacctatattgatggcgattataaaattttaattctaaaagatattggtagtaaaacatcttattatttcagaaaaatgaatgatgtttcaataacaatagttgatagatttataaaagatttgaaattattacaagaagaattttggaaatcacttttacataatggaaaaattgaattaaaaattttcaataaagataattttatatcaaaatctgattcatatccaaattatgatgttaatttaatttcaaatgacgattataatttaattaatttaacagtttcaacttatgaagctttacttgattctaaaattgatcattcatttgaaccattacttacaaatatattaagttgtgattattttacacgtaagacttcaaatataactgaaagaataattgtcattggaaccaatttgggaatattcatgagtaaagcatcagatccgactagtttacatcaagttcatcatatgaaaaatgttaaaaaattaactatacttaataatgaaattattatttgtataagtaatgattcattgtataggttacaaattgaaaaactatattcaacttataaatatggtttaccaccatgtgatattaatatttttgaagaaaataaaagacatataaatgattattcaattggatttcaaagtttaaataatggtcgtccaagtagtagtggtatgccatatttatttacatggagtgaaaaaaatgtttactatagtgaattaaataaagctaatggttataagttcaattggcagtcatttaaaactcattataatataattaaattgcagactgtttatgcgaataattttggtattgctcataatgttgataattcagctgtctggaatttgagtaaattatcagatattagatcaattggattaaataatttagatattaaggacattctgaaaaatgagaaaccaataggtatttttccattcccaaataaaacaaaaaacatttctgaagttttaattgttttcagtaaattttgtacaagagttaaaaacgttaaaggtaaatatattcaatcaactgatgaaattatttggtttggatctatttgtgaaagtgtttcatttgattgtgaagagaaaatattgattgcagttaataaacaatctgttgagattcgtaaactatttgatgaaacatctaagaggagtgaattaattggatgtcttttaggtcatgatatttcattaattaatgatatgccaggtaaggcaattttgaaatgtcatagattaaataaagatgattccaagttaagtacaactgttaaagaatatgaaaatcaagttatcttcaagatcaaaagatgtcatagctctgttaaatgattttgtattttactgtataataatacaatttgtatattaaataaattaaacgattctgtatatagatgtcagtctcagttattcttctgcctcatcttcgccttcttcttctacttctacttcttcctcttcatcatactcgtcatcttcttcttcatcttcacctaaaataacttgtgaagctaaaggtaagataactcttgcaatttcactttcattaacaatagtttcatcattttcggtagttttcaagtttaaaatttaagagagtttcgtcgcagaattgatctattatagcattatcattttgatattctgaatcattatctaaattatgttcaaaatcatattctaatgattgtaataacgcaaattttctaaattgatctttaaattcatccttggaatcttgaaatgttttgaaaaaaattgatttaatttcataaactgatggatcatcaagtttaatatattgaattttatcatcaaattgtttatttaaattttcaatatcacgataatgtctctcttgaattaataattctaataatctattctgtaatttagaagtagttgaaggatccttaaatgttttacttccacctaatggattatgaattaattttgagtattcattaggaattgattcaaataatgcttcaattgattcaatcaatgaaatttcattattatcaatacattcctttatacctttgaataagaaaatattgtaatctaatgcataatcatgaattttggatagattttcccttgaaatttcgttaagactatctaattgaggagatactgttaaatctaacaccatttcaatacttcccacttaccaaaagaacaacatttcctctccatttatcatctgatccaactcatcccacatgcactaaggctatgcaaagaatcatgtaattgaacccttaaataattttaaaaaagacgcgactttttctatttttaatttttcaaatgaatttgtggtcttctcagtaaattaagttctgattgcattgaattgtgtttcttttggaacaaaggtttgtcatcatggagaatacaccaaatcaaatggatccaaggacaaggacaggaccagggacaagtacctgggcaaatacctgggcaagcacctggtcaagtacctggtcaaggtcaacctcctaatagtcaatccgcgtcaccaggtcaaaatggtcagaataatggtcaaaacggtaagattagctttcaaacaattcataatcacgctagacaattgcttcgtcagtataccgtagaaaaggaagctgcagagaaggccggtctggctactccggaaggtaagcaacatatggctaaggctgagaagataaaatctattcttgtaacgtattctaaaagacaaaaattattacaacaacaacaaaagcaaaaacaagcccaagctcaggcacaggcccaagctcagggacaacctcaaggacaattgcctgtacaaattcaaggacaatctcaacaatctcaagtacaagttcaaactcctttacaaaattcacctcaaattactccacaatcaaatattgcatctcctcaagtatcaataccaaataataatcaaggttcaccacaacctcaaatacctcaatcattccaacaaaatattcctgctattcaacaaccagttcctaataattccgactaataataataataatatggcacctgttccacgtatagcaactcctcaaccaatagagggtagaacactttcacaacaaattagttcgttagaagcaggtttgaatggtggcttatcaaatgctggctccaatactggtacaacaactcctaatacacaaggtccaaatggtactaaatttgatccatctcaagtaacacttacaccaggtcaacaattacaagttaaaagacaacaattattaaataaatatcaacaaattattacaatgtccgatcaatttaaaaagaatatgattctcattcaaaagaaacttcaagaacctaaccttgatgcaaatatcaaatctcatttacttgaaaaggaacatgaagttaaaattcgtcttgaaaattgtaaaaaatgcactcaacaaattgctgcacaattaaaactggcacaacaacaagcacaacaatatgcacagcagatgaatcaacagaatcgttcacaaactgcatcccctgccttaccattatcacaaattccttcacaaattcagcaagattcaaattttacaacaaatttaaacagggcacaatctcagggcgcagctccaattcctcttaacactggtgcacctttcattaattcaactggtttaggatctccgattactgataactcactgctaggtaactcccaaatgaaattaaacaatacaggagttggtacaccaggttcaagtaataaaccagcacctaaaaaggaaacaccaacaactaaaaagacagcagctaaaaaaaataacactacaaataataaaagaacaaatgatcaaacatctaatgatacggctgttaattcagctggctcaaatacatcattaaacaatatgacaccaaataaaaaacaaaaagttggttcagctccaaattcttcaagtactggtaaaactgcggtaaatgctaatggtgcaggtagtgactcttccaaacttaatcaggttacttcatcattttcaattgatagtgttgaaagagcaaaattccaaaatttaaacattcctgatgatttaaatattaaacaacaagatccggtatcaattaaaattaataatcgtccaagtatgttaggtggtaatgcaattgcatcatctgctttaagtaatcctgttttagttaaaccaccaaaatttgaaattgaaggtgatcgtgttttaaataagagaaaattaaaggaattagttaatagtgttgtaagtgaagaaggtgacatggaaattaatattgatggtgatgttgaagaattattattagatttagcagatgaatttgttacttcagtgacatcattcgcaagtggtttagcaagacatagacattctgaaaatcttgatgttcgtgatgttcaactgcatttggaaagaaattggaatatacgtattccaggttatgcagctgatgaaattcgtatgataagaaaatttgttccaaattctgctcatagttctaaagttaatggtgtttttatcaataaaagtgttcaaaagggaccttaatgaatgtatattatatattatttaaagtatttctgcttgtttatgtaaaatcaaaaaaaattgtcaattacacaaataaaaacttatgataataaggatgaatattttgtaaattaaacgactctatattttcttttcatgattttctaatgatttattcagtaatatgaacatcaaggattatgtattaccaacttctttagttgttccatttggtgtcaatatagatacatttatttacctatgtttattaacgatatttcacccattgggaacatggattttacgtttcggaaattttgaattatttagtgaaaaattctgtttcaccattacattattatggataataagaggaataaataagtattatagatcacttcctaatataaatacaaatagaacggtgttgataacgggtgggagtaatggattgggacttgaatgtgttaaatcattgaactctgatgtgaatataagtaaaataattgtggttgatttatgtccaagacttgaatttgaacacttcaagaaggttgaatttctcaaattcgatttaaataatgatatggacaagttaatacaacaaatcaatttggaagaaattgatgtcgtggtgttaaatgcaggtaaaagacaaactaaaacaataagctcattatcaacttcggaattatcatcaatattgaacattaatttgatttccaatattaagcttctgaaatcttacattgaaatttctacacagactacaaataaaacaaggcacatagttgtggttggttccgtacttggatttgttggtccatgtaagttaggtatctactcatgtactaaaatctcattattagcaattcttgaatctttacaaacagagataccttcttggattagattgagtatgattctacctggacaactaaactcgcaaatgtttgcagatgtgtccgttaatgaattcttagcaccaataatagatataagactactttctttaaagattagaaatatagttaataacggagaaaatggatcttttgcgtatccaatgtatggcagattacttccaatatatcagatattaccatggtggatgcaaaaatgctgtagatggtttagcggtatggataatgtataaaacagttatataatagaagaacaattgtaaaaaaatgatataggaatctatttagatttatcaaaagattctacaaacccagtgattttagatttgaatgcatctatacttagaaaaccatcatcaaagaacaattcattaagtggaattgtagttttatgtgtatttccatctaattttagtgtaatattgtaatttggatcaaatttagatttagttgacgtaaaaacactaattgatttattctttttagtcccatgatatttgacacctttttcaacaaatttagtgaaacagtataatacaaattgtacaataaaaaaacttaccacagctaattgtaaatatgagacgtatgtcttatcggtgaaatcgttcttgaattttttctcaagataatacattaaaccagctagtgcaactgatgaataaccaagtattaatttagtgtcagaatacttaaatgattcggtatatcctaaagtttcaaaaacatcacctaagtgttcgtcagcttcaactctcattgctggaactgaatgtatggaaaccttattgaatgacattgtgcttgtggttctgacagttgaaagaaagacacgttaatggtaacatgaaaattgacaagtttaacatgcgacgtattctctacatggatattttcaatgttttggatttctacgataaaccttacgttttctggtatctcacaagagattcatatagtatagcgtttaagttggtttagtgctttaagatctaaatataatactaataaacccaattattccaattacttactaaaaatcctatacaaattactcttcatttaaagttttatcatggaatactaaccatggtttcctatcacctaagtctataatcgttttagcaaattcggagttagcccaactaaaccaaggcctggtatatgattgacccattggagagttcaccttgaccccttcatgtattaaacctaaaccaccagtagtagtttttattatttcaagtaattttgtgatttcttcttcatcatccgatgttcttatttgtacaagaattgacattggccatgcatattttaaaccgacatgaggacctccaattccacttataaatttacccctaatatagtaaggattagatgatgataagatcattttcctggtattctggtaaactttgttactcttatttaaataaccaatatcagctaatgaaagtaaagatggaatgtttgcatcatccatcaaatttactcctccaaaaccatcaatctcataagcgtaaacatccccgtagatgggatggttaacaatagcatgtttctctattccctcataaacactgtctgcaattgattgcagtattgtagataatgaaacggacataatttttggatcattataagactttaaagttggaattactcgtttcaattcagtgtacatgtgagcattagaaggtattaaatactggaatatgcatgcatcatcggatggcctgaatgatgaacgaatcaatccaactgcattaagtggattaccataacctgataggggtaatgtttcagacccaatatttgtcgttcttttgaatgtataacgaacacggttcagttctccattgggttggaaagttgatatcatttcttgtttcaacactgatgcaattttaattaaagcttgagtgaccagttcattgtccaatatgctaaaatccctcgaattatcaatataatcattagttaaagttaaaaatgaagctagagaatctaactcccatttacattcaaaaacctttgaccagtccggtcttggtgtcacatcatcgaatgatgggattctaggttcaatttttgatttctttggtggttgaaatgcattacaataaggatcatcgataatatattcagcttgttgtaaaattgcaccttttatcaacgttagtaaagattcatccatggtaataaacttctgataaacagaaagttgacgagctgaatctcttaaccattctgctggtatatcaccagttgaaataaaagttcttggcatatttgtatcgtgccattgaattgtggtatctagggtattagggaaggcattttcaaataaacgtgcaagatcagggtctttcaatttagacttgtattcttcaattattgattcaattgtatcagagtggaatgttcgacaatcttccgaaggtcgcatgaatggtaatttaagtggaccattggaatagggagggtgtggggttgatgcataagaggtataatctgggcatttcgatataacggatggtgatttgggtaaaaataggtatatcaacacaaccgctactgcaatcaatagcttagtcattataatttgttacctttttaactaacaatagagtgtataaatataagcagtcgtataaaagcatggaaatgaaactgcaaaatgtgaacatctcaaaattcatgttgcacttgcatcaattatatacggtgttttcttcttccttttcttttcttcctttaaccaaaaaaaatatacttgagcaatgtctgagctaggccaatttgttgcttcagtgccaccagtgacacgttttttaacccttgcttcacttgttgttggaggtcttcatgctttgggaatagccccagtcagtgaattcactttggattatccgcttcctttaatggaactacatcgtttacttacagcttttgtggtaggaaatccacaaccaatgcaaggtcttatggaagtgtacatggtttacactttctcccgtggtttagaagaagttaagtttcgtcgtagtgtggctgattatttctggtatctcatattggtgtttgcatttgttttaattagtggtatgtgtgttataatgactgttccaggaccagtaccaccatcattatcacctgcacttatgggagctctcacatgtacatggtctgttgaacatcataatcaagaagtcaatttttatttcctcccaatcaaagcatctttattacctgctgtatcattaggtttccgtctgctggttgatggtactcctacatttattcttgctcttgttggtgtaggagcagcatatgtttataattgtcttgaaacacgttcatggggtccactttatagttttattgttggaaaggaaccagaaagaccagcaagggttggtggaaatggatggttttatgcttccggtaaattggaggcaccagtttggttgaaaagactctttaaggaaaagaatgttccacctgctgctactacatctttcactagtgcaggtctaaaaagtacattcaaaggggagggacgtcgtcttggatcatccgttaagaaagattagttaatagcctcatcagaagttgacaaagaatcgattattaaacggacttttgttaatcaatccttatgtttatattctatttaccctttatagtcaaaagtaaatgcttttttcagatctaagttcatgcatgtaattacgtttactgataactacatcaaactattacgtaatcattggcatcctaaactaagaaagatggaaaagttatcaacttccttaacatgcagtatcttcttttccctgaattgtaatatattcatcaagatataaaatatacaaagatatgggtatttgggtatttggttatggatcacttatattcaaaccaccattacatgagacaatagggcctgatctgacgaaattcacaggtcacgttgatggatatattcgtaggttctggcaatcttcaagtgatcatcgtggaactcctgcatttaagggaagagttgcaacaattatacctgtctcatatttagattctaaatcacatgaatcagtaaaccaacacgaaaggttaactaatcctgattcacaattatgtgttactggttgtctatactacatccctccggaacatgctaaagaagcacgtgagtatttggatgtcagagagcaggatggatatacgttaaaacatgtcaactttgtagttgagtctgataaggaaaatacacttttacaaaagttcattagagatgaaaacggaaatcctttggttccttgcactgtttatgttggtgatccagaacatccaaatgctagttatattggacctgaatctttggaggataccgcaaagatagttgcacacgctgttggcccaagtggtgagaatatagaatatctgcgccaactatgcgattcagcacctcctgattcatatcttacagagctattaaatgctgctatgagagaaaggggactttgataaatattagtttatagagaattaaataaaaacaaaaattagacataagtaagaaaatagataccatatcagtaacaacccccaaagggtcaaaaaaaatcaccagatgctctcctgaaaaaagatcaatactcataacttttagtttgctcgctgtgtaatatcaatcacatgagtcctgtgtatgacattgatctgaatcactctgggaagttcaccgataagttaagggtactactaattttgacacaagtatagaccctttattttttatttatgttattctattgataacaaatagtttcaacatggcactcgaaaataccacttcaacagtattggctacaataggtacagttatatggtgtatccagttatcaccacaaatatacttcctttacaagaaaaagaatgcagaagggtttcctccattatttatgctactttggtgtatgtccggagttttcatgtgcttatactttgtggtatcagattcatatatccccatgcaaattcagccccatttattcactttactatgttcaatagcatgggttcaaagcatgtactatcctccacagagttacaggacgggaaaaatattactgatatctctttcattctacttattttggatagctttggaagttggaacatgtattccattacgatcacaatatgcagatggtaaaaaatggccggatctagtatttggaatcattgcaactatattcttgtgtgctggtttactacctccatattgggaattagtacatcgtaatggcagagttttaggcattaactttatatttttagcaatggattcaacaggtgctgtatttagtatggcagcaatgtgtattggtacattcgatactatggggatgactttatatgctttaatgatagctatggaattaggattgtttgtttcccagggaatatggatgttacgttttagaaacgaagaacttgttgttaataaagttgaaaagtctgatgttaccgaagttgaagaaaaagtcctgaacgataaggaggatttgaatgatgtgcagagtttaacttaatcaaagatcaagtcgaaaagtataccaactaatgaactacaagtctactttattccgataataagtctctattttttctatataagttacaatatgtacagagtgtatatacaattttcatgcttttcttcctggccatctccaacgcctaacaacttcccaattaaattctagtttgtcaataaaatcttcaaatgcacctttggtcttaactacactgatttgtgatttaactctctttaattcatattctgttttacattgtcgtagtctttcaaatctttcatcatattcattcaaacaacgtaataattcagttctatcccaatttcctaatgcttgtaagtatacttcaaataattttgttccaataggatatttcaaatcaaccaaatggtttaaaagtgattgaatttctttgtctttcttgaataagttcagtacattgatgtatattgttaataaactatcatttggatacaatagtccttcgttggtatccccatatgctctagaaatatgctttttgaattcagtcattgcaaaatcaagtggttggatatcttgattctgcccccatttaacagtatcgtatattccaagttcgtgtaatttataaacagacacaaataatgcggatatcgataattgagtgatttggaaataagttgcaatattgttgtatctattaaatgtttcttcaggtgaaaataaggattcaccaagtaaatgtgcagagttcattcttgttgatttaaatgctgttgaatcatatagttttcttgccatttctaaacaattgtaaatatctttttcagattctgtttggttcttagaaattttgtatagtttggaaactaaatgtgatctattattgtcatcgagattctctattttcaaattttcaataattgaaaacaaagtcttaggtttggtagttttatttattagtaaatctaaaacactatagttattgattccatgaatttcatgatacttcaaatactcgtgaaacaatgttccaattacatgttctttaactaagttatgataattcaattttataatgacgaactgccaaatttcaggatacttctttaaaatctcaggttcaacctttttgaaaatattgaggaggtcttgacaaattattttttcatttgattcattgacagctaagagtaaaattgaattacataaaaatttaatattataatcaactttaacactagaaagtagttgatttctatcattcatatcaacattagttttacttagaccttcagatattttattggtatttttcatttctatagtgtctgtttcaattaattgaaattctttaggtttaaaattttgaagtttccagtgatcaaattgtcgttttgcatttttaaacatttgaaaagattttctgaaatctttataaaaaatcatattggataccgcaatcattgtagtaacatcgacttctaattccgagttctttgaagtcattgtattaactgctgtaactaattttgaatgggctatattacagtattttgaaggtttcataaggtgttcacctgtatgatcaaatgaaagttgccataaaatttctcctatttgctctagtgtatgagggtttgaaatgttattttcattcaagtaaagtgatacaatttttggtaaatgatctagttttgttcttaatgcaaagttgaatagattgctgaaaagtggaggtatttttaaatctcttgagtactcactattctgttgcttcaaaagatataatttctcttgatcaattaaattcaattctgttgaagactgtttatacatttcaaaaaaatacttgtattcaagttcgttcgatggaattctcaaaagtaaatcatatttgacaatttcgggtaaaaattttgattttgttaaacttaacaaacatttagtaactgatggttcaaaaaatgaatttatccaaataagaatattatcatctcttgtttcactattgggcttccagttcttgttctcttcaaagcgtattttgagtatttggacagctacttgaaatataggattatttataatttccataattttatttgttccgaaaacactttcatcgacaacttccttgctcacaaataaaggtgaaggctttatgttatatttagaagaatatcttttaattgacttttcaaccatttgattttcatatgatggatacaaaattttcaacattgtatgtacaacaatcataaatgctgtctctatagatcttgactcatttattagtttgaatgttatatcatcaacactgtttttactattctcatttattgtagtttctttaaagcataagaaagagaaaaattgttgtaaatttgatgaattgtctatcttattggtaatttcacttttcattgaaattttatgatataatgaatttatgttagtactattttgtttcttgcaaagcttcgtataccattcaggctgatctacagccagctgttgccttatatcatcgattcttaagcttttcgcttgtgtagaataatatcttgagtaatttatatcatatttatgcgttatatgattattcacgtacggatgtcgtagtacattattttgcactatcatctttcttccaaataacgcactcaatgtcgttattctattagtagaacgcatttttcctaatgttcgtcccaatgctgacatagatacttcaagagatgtctatagtttttcaagaggtacagatttactgaatatagtgatgaaatttgaacgttttttgtttcctccaaaagttttttgtatgagaatgaatttttttgaaatttcaatttctcatgggatccggagtttattacgctgatgattgaacgtgtctttctgattggtttggatgataagggatcagcatgggtactattaccccacagatgcgggagatgcttaaagaggctgtcaaggaggaacgactaaagaaaaatgaaggtacaaatagacctttgaaacgtcccaatagggggaataaggcacatttaacaccggttcgtagagaaagacaattgaaagcaacaaaagagacgcataagaaacttgaagatgaagattacaaagttgagaggtatgtgatacatattgaggatgatgaagatagtactaaaaaacaatcaaaggaaacagaaaatcgaataaatgaaaaacccgctttaattaaagaagataacgataccaagggcgaagccacccaaaatgatgatgtaccatccgttgatgatgattctgaggaagatgaagatgttgactccgatgaatttgaagatgttgatttggatggtgatatgaatgaaacttttgattatgatatggatgacgaagatgaaaatggtgaaattaatattactattaaacaacatagagatgctaaaaaagccaaacggaaaactgttgttgatagtgaagagagagttcaacgtagaactttacatttaatgcacttatttactatggttggacatggtgttactagaaacgcgtggttatcggatcatagattactgattcagttacagaaacaagtccctaattctttaaaatcagaattgaatcaatatttacaacatcgtgttaaatcaaatgttagtacacaatctaaaacacggaaattgttagactttttaagacatttgatggaatattggcaaaaagtatggaagattaactcgcatatgcccgtattgtataaaaagacttgggatgaaatagatcctgcaacaagttgtaaaaagtctaagaagaaacataagatgacaaaaaaagtttttattgcctcaattatatcacatgttggatcaagggatttagcagcacaaggatttgtagctttgctaagatcacttaacttacctgcaagattagtattctcgattcaaccacctgatttcacaaatatgaaaaaatgtagtgaaattaagaaagataatcaaaaaggtgatattgtggatctaactgatgaatccacagcagtagcaaagccaaaattccagagcacctcgttcaaatacaaagaacaaaaactcattattatcaatgttgagatcaaaaaaggcttattcaaatgcaccaattaaaactgaagcacaagaggcatctgaattttctgaaaaatttggatcatggccagtattttggattgaattatgggataaagatgcaaaaaagtatattaccatagatcctatagttaaaagactgatcgaagtcgttaactggaaatctaaattagaacctccaatgaactgtattagaaacaatgcttggtatgttgttggatatgatcgtattggtggtgttcgtgatattacaagaagatatgctaaggaatataatgccaaagtacgtaagaagagaataaccagagaacccaaatgggagaaatggtgggattcattgttaagaggagcttgttctgcgaaaagaattggagagaatagagttgatcaatttgaaaaaattgaatttgaagaattaagtttgaaagaaggtatgccttccaatgttggagatttcaagggacatccaatatacgttcttgaagcagatttaaaatttaatgaagttttaatacccaaaatttcatgtggcggattatctaataaatcacattctaaaaaagcatccgatgggttcattcccgtttacaaaagaagtaatgttcatatagttagaagtcctagaggttggtttatgcgaggcagagtccttaaaatgggtgagagacctttgaaaatacgtgagaagaatattaaaaagggtaaaagaggtagagaggatgattttcaattaagtgatgaagatgcaggaaataatgatgatgatggaaggttgtatgcagaatatcaaactgaaaaatatgttcctccaccagtagttgatggaataatacctaagaatgcattcaaaaatattgatatttatgaagattggatggttcctgaagattgtgtgcatatacgtgatccatattcacagaaagctgctaaatttatggatattgaatatgcaccagcggttgtaggatttgatttcaaaggttcaagaagagatgttaatgctaaaatagaaggtattgtaactcttaatgattataaagatgccgttgaattattatgtgatggtataagagagatggaagatgaagaaaagagaagaagagaggatttgattaatttaagatcatggaaaatattgcttacaaagcttagaattaataagagattggctgatgagcatggtggtatatcaagtgaagaagaggttagtaatgatgatactagtgctagtgatgaagatagcgaagctgaaggttttgaaataggaggattcatgcctaatgtatcaagtagaactagaactcagacaaatgtagtcgattctggagttgatattaatgaaagatcagatttaagtgctagtgattttgattcagacgtaccacttgatgatggtgatgatgatatgtttaaaatcaaggaagtaaatgtgaagaagagaaaaacaaagaaacagaaaacatctagttccatatttgataaggagaaggaagaagaaattgtgtacaatcctgatgaagaactttatgatccgggtgataatagatacgactattcaagtgatgaagatggaaatgagggtgctagtggcggtgaagatagaaatgatgaggctagattggaagagcttgataaagagtttgcagagtttgaaaatggtttcgaaaatattgcaacagataccaataatttgagtgaagaagaagaagaggaggaggaggaggaggatgatattgtttataatccatcaaaggatgatgatgatgatgattatgaatttgaatacagcgattaataagtgtacagttgaatctatataatataaaacaatgtttaataacataaaaagtaatttagagaatataatataaagatactattttttgaacaatttacccttttgtaatgctttttgttcaagcaatttttgttctcttaaatcatctaatctagcttgttttaaagttctttcttcatcttctaaaatttcattaccagttgcttccatatcatcactatcatcatcatattgatcataataacttctctttttacccctattaaagatttcccaaatttcatccttactataaccttgtgatttcatattatcataagctcttttttcctttgctttctctctagcgtaaaatgcatcttcttcatcttcttcatcaacaataaatccatcatcttcataatcatcctcatatccatattgatcatattcatcctcatcttcatcttgtgcatcaatatcataggaatcacttttcgttgatctattgatacttgataaatatcctttactattaaatttagctgataatggttgagatgattgatattgtttcttcttgcttaactttttgagtaaatcagggttaggtttagcaaattcaggtttcctcacaggtcttgaaagttcttgttttgaaattggattttgttgtgcaaaatcttttcttgatttcatttctgttgatctattacccgttgaggtttgtaattcccttgtacgagctttatggattgattgtaatgctctacttggaccttttggtttcgattttacaggtgatgtgaatggaatagcagatgttgaaggttttgctatggtacttgcttgttccattaattcttgaaatgacaatttattagcttcatttgttgatggtttattagtaggtaaagatatattatgttttgaaggtttgaatttaaatcttgattagttggaggtggtaatgatgatgattttgaaggtggtggtaatgatctcgatattccaacagatgatgatcttgatgaaggtgttaatgaagttgatcttttaggtccagaagatgtttgccgtgatgttcttgtttttgtagtaggtttaccctttaaagcatctaatctttctctctcctttcgccttgcttcctttaatctacgaactgcagggtcattcatctatgtatgatacattcgatatagagttaggtctttgccgctgtgatgttgataatgaaggtctatttgatattggctttgatgatgatgttttcgactgtgattgattttgtgaatttgaatttacagatttatttgaactagttaaagaagttgaaacatttttaactttctctttcaaattcttatccgtagatattttcgatagtaatgaagagaagctcataaccctgtttgatgggtgttattgtgtaaaagttattgtaaaagaagaagaaattgttaatataaaagttaagaaatttaattttccataatctgatgcacgattcatgtcatgtcctggagtgtaattcctgaaggaattcaataaaagatatattttgagaagactagtgtgtctatatactataccatcacataaaatactgttgtagcttatcataaatttattagagtaattatacatttgattatataggatagaatagaaatggggggataaagacattgatatattaatattttagtttgtttattaagtaaattaaatcaattaaattaattaaaattaaacaattaagtatctaataggaatgtggattagcttaataagataaccaacaacacccatcataatgaaacccataccaacagctctaatcaattgtaagtattccttttgggaaggtttagtacatttttgaataaaacgagcaccgtcttttaaaaattcgactggagcgtcagtaatcttttccatatcagccattgtaattgattatagagtagttgttaatgtaaagaaagcagaaccaaaagatcaaacctgaaagataaaagataaagatactaactaacacgtacatagaaaacgaaaagctgcaatttctcgacgatttgaatttttctataaaagtctgtgaaaaacgacttatcgtcttattaatcgttatattatagatgttatagatgttatatagaatgtatatcgatgttgtaacagtagataacagggttagttaccaaatcctttccactcttccttccctcttcctcttcttcctcttcatcgtcctcttcttcagaattcttatccttctttggaactttagtatcaatatctaattcagtgagacgtttatctgacaatatttcaatctgtatcttctttactaatggtgggaagttctttgaaccacacaatgccttgaatggtgcaagtagaagatccattggtactttttgttcctctaaaattgcttttctttctgcaatcttcttatcatgtttttcctttctttcttcctttgttaattcttcttcctcttcttcttcttcatcttcttcattatcttcttcttcactgaagataactctctctaattcatctacccatacatcaattatatgatatgtaatagaccttggagttttatcatcatctttcaatatcacattctctaaaacattgaaatatgctccaattttatctgcatcccattcactctcctttaatcttactaaacattctctaacaatatatctcataagcattaaaaatttatcaactctccatttatcaagttctctccattctttacacataactgtccaaaatgattcgacaaatttacaaaattgttcttcaacaattgattcactaaacaatttggctaattcattggctaatctttgttgtggtcttggtctatcacagaaccacattgtataaaataaacctttccataatttattaagttctgatgtatctaatttaactgctttttcctttgatgataaaaatcttttcaacgtagaaagcgcattttctctaactgttctcttattagacgctaactgtctcacaaaagcattggtcttcatccttatccacttaaatcccttgccaaaagagatcaaatatatcaacaacttcaggtgaaagttaaagaaatctgaaaaaaaaattcaaaagaaaaaaaaattttatgaaatttcatccaaggctgtgctctacatgtcttctataagagctgttactatcagagatttattatacggtcttatatctgttttgcttctcttatggacaactaaatgaataagaacaaccagcagaaacagaaacaggggcctcctaataagagaacctatgtcggattcaactactggtaaaaaagttaatgattatataccgaaattcatctcttcaactccttggtattataataatgatgcattacaagttgattcaaatagtaggaaacgtaagactgatgatgaaaattataaagaaattaaggataaaagtaatgatagattaaaacatcaaagactaaatcctgaatctagtgaaatcattaaaaataatgaacctagacgtggtttaggtatagttgatgagtttaaagtagtggatgatacagtaggtaatgataatattaatactaatactaatattattgtcaatgatgatgctaaaaattcaaaattaaggaaaaagattagagattggaagaagaaaggtagatgtgaaaattgtggtggtaaacattcaaagattgattgtttagagaaacctcataatagtttcctatatttatagagctgaatccaataataattctaagactcaaactaatcatattcttgttaaggcagataccgatgattgggatgtaaagcgtgatagatggcgtgggattgatatggatgatgaatatgatgggattgttgataatttaaagaaaaaggaagaaaaattattaaatgaatataaagaatctaataaagatgctaaagatactaaagatactagagatactaaagatgaaaataaatctcttttaattgaagccataacatcaaatacttcatttgcaattgatccaaatgataaatcaataactacaagatcattaggtgaaaagccaagatatttagaaactattaaaacaggtgaagaattaagatataatccaaaatctcgtgtatataaagatctaaatgaaggttatcttaatgaaagaggtcaatttataccttatttaactggtgaagcagctgaatttgaaaagctgaaaaaatttaatagaactatacaaactaaacaaaagcaaaaatgggagaatgataaagaaggtaaagaatctgttgctgataaatcttatgcaactgaaatttctccaacttctgcaatgttaaaattaaaggaaaaggaagagaaggatgaattaattagagaagctaaaaggaaagaattattggaaaaatatggtgctctatgatctatacttgatatatgtctattggtgatactttgctgtctcaattttcccaatttgacctgaagcttattgctaattcaataaatggttttaaagttccactaatttttggagcaattcattaaatgtttaacaaataatttatctctcattgataaaagcattagtatcgttacctgttctgtacatgctttgattgaatatttctaaataatccaaatgatatggtctatccaataatgcaatatccataaacattttggtgaaaaacttttccggtatatttctatcagtcaatgtaaattttttcaattttggtaacgattttaagatataattaaaatcaaaccttaatggttcattgggtctatcatttcttctgctacccattgccagataatgtatgttatataaattactagaattattcaaatcgttttgaataacaagttcttctaatgttgacttacatgaatttaaaagtacatcaatctccattgcatttacgttagtattgtgaaataaaattcttttcaaacttggtaatattggtggattaaatccaattggaattaaccttgtataattgaaagcacgatctccaaattcaagattttcaagatatctaaatttttgagataaatctgggtgtgtaactattgaaaaaaatgtatttatatgatgtctagctattgataatgatcttaactttgttggtgttttgaaatatggtaaaaatggttcaactagagacatgtcaactaaaatttgtttcaaatttggcattactaatacttttgaaatttttgaaatattaacaccatcaggatttctttttgtgtatgatattgtaaatttttctaatttatccagtactatagtacctttcgggtcgtctatctcatcttcatcaacttcttcttcttcatcataaaatggatataatatgaatatttctaactttctaagatttttggtattttgaagaagtggaacaacaaattcaattattggttgacatgaatctgaactaatttttagttccaatagatttgtaattaaaattgcatttggattagtaaccaaatttatgaattccttattcgtgtcatcttcaaatgacaaacatagttgtttcacttgtatcgttgatttaattaatgattttaagattttaacttcatcaagtccttctaatgaaaatttttcaattacaatatcactcaatgaaactttttgatcaaataatctgtaataacttttcaattgttctaaagttatataagatttaagtgcataagaacttattaagagtggtgattctaaaactgtatttctccatcctttacatactcttaaaatattaaccaatgatctattatccaattgatcaaaaatctttttcaaaacttcaataggtaattgtttcattaaattttgtttatctataggtttagttgaatcattatctaaatttaacataagatctgcttttctcttttgaatgagagctttacctttgaattctattaacttccaaacttcataatcaacattagattcaaaattatcagtctttgagatatcagaaactttaagatagtattttaatgctagacgttcatttatatcaaaatcatggtacaatgtgaaaaatttgtataatattctcaagttatctggatctaattccaaatactcattcatcaaactaacagctttcttgaagtctctattagaaatataagcattggatagtgcatcgacgatcttgaaatgtaacttattaagtttgttctgttcattatagtattttttaacttcttcaagtaggtcctccaagagatatatcgatccactaatataccctgattcatatgctgaaagtccatctaaatatttttcgaataaagcatcaaacggcattaattggcttattgatgagaaagaacgtgtaaagaaggttaagggatcagaataattttgatgacatgaaaaatgtcgtgcagatttctcaactgtctactattcgatgcttggcattaacgactttttaagcatttaatttaggatattaacaaatataagtagggatctataaaattactctatcgctcatcttataatctacagaaagtgacagcttttgtgtacgtatataatgaacagtatcaggatcaatttgacagtattgtataactaatttttgcaacctcaaattattaggtctattgaaaattttaataagtgtatcaccatcaattttgttcattgatagattaagataattaagatcatcaaaacaatgattattatgtgagtattgaatcatttctttcaatgttaagttattaaaccttggacaaccaactaatgataattgttgaattctaggtattttttcaatgatgtcagttatttggcaataaccattagttggtgatggttggttattcgatgatgatagtttgttttcaaagacaagatttgaattaagtactaaatgtaagttcttaatattacagtttgtggatttgagtatatcattcaataaattaggtgtgataccactatttcttaacatcaaagttgataaattacagaaaattttagtttgatgaaatgaattaaaccaattattatgtgataatgttaatgaattctcagtttcagtttcaactactttcaatgtattcaaattcccatctttattagaaattgatttccttaataaacactcgcatatttgaactgttgaaacattgggaatatgatcgagttcaatacttttcaaatatggagatataattgtagataatgtagttggttgaatgttcactcttgataatgttaagctctgtaatctaggaaaatgatttcctaagagaaaatcatcgagcagtatgttattaagtttattattagttgcattaggatcaactgaaatacttaatgattttaagctctctaaatggacaccaatacctgtagatttttttgaacgattatcaaatttggagattattaaaactaaatttgataaattataacattctcttaataatatttctaaattggaagtttcattaataatgagtggtatatttaatttaagggatttcaaattacttaaaagtgagaaatttcctttcatatagttgtgtaatgcatgatagttacaactgttaagtgcaattgataaatgattaacttgtatgtttttccttccaaagaataacgataagatactattttcacaagaatcatgaggttcaatgttaatagagttaataaagatagattgcattttctttttttgattatgtttgataataaattttaaacatttttcaaatgattgtttccttatacttttttttcaatgtgatatcatcaaaaatgttagatgaaccaataagtagatcgtgccaatatgaagatactgttaagcattggatattaaaagataatggaaattgtttaaagataagattaatgatatcaataggtaatttttgcaaaggatcctgacattttggtagttcaatttctttactcttttgagcattagaagttgaaatatccttctgctttttcaattcagttttcaattgttcatatagaatttcatttatttttccattttgattagaattttcaaattgtcttattttcatatatccttttttcagcacttcataagctttaaaagtttcatttatacttaaataaactttatttaaacgtaaataacctttaggattatagggatcaacatgaatcataattttagcacactttaatgctttttctacattattcaatttcacataacatgcagataaacaatctaaaacattggaatagtttttatgataatgagtggatttagcaagtttttgttcatgtttatataattcaagaaggttgttgaattgaataattgcatcttggtaattattttgcttgaatagccttataccattttcaaagactttattttgattgtccattataatgtaaaatcatctgatatataattgattattcaaatacaaaaacagacttaacaatataataataattcaaattcaaactaattgtcaacttctccatgttgtgagaatctgaaaaaaaattaattcgtgtcggtggctcagtcctttttctcatacactgattaatgcatgcctctttctctccttcttgaagatagaagtatgtaatagtggaaacctcttgatagctattccattgatatatctagcttctttttatctgttactaccttctatttgagtgtatttatttaaatatcaagggttatgatcacgtgactgctaaaaaactttgaaaggcttcttatttagaaatttatacagatgataacaatttctaaatattttgaacaagaggttttttcataacaattattcatttcactattagagtgatattatcgtattaatacagtaatacacctaattactgattactgacaatactatactaccatctaatcaataaaaaaagggttaaacctgtctaatacgaagacctaccacaacatattacttgtcatatagcaaaatagatttatccgcatggtacccaaaagggaaatctccagaatctcggctattatatctgttatcactgggattgacgtaactatttttattttcagttttccatatcttattcatattagataactgataaaaaatggttatatttattggtaattgctgagtttttcattcgattatatattaaaagataagacttcctgattacatattttattctattttatcttatcttatgttttcattcatttaacaaaaaacaatggcaccgatcaaatatccacatccaaatccatcaaaatcttattggattgaagaaggtccaaatcatttaaagaaacatagaacaactaaagaattaccaactgaagtggaccttgttattattggttcaggttatagtggtacatctgtcgcttctcatcttttattatcaaataaatcagaaaagggtgaaccttttaatggttcaattttaatgttagaatcaagagatgtttgtgctggtgcaactggtagaaatggtggtcatattcgtggtaattatcaatcaggtcaagcatctttcattggaaactttggtgagaaaattgctgctgatatggtcatttttgaacataatgaattacacaaagttaaaaaattagttgaagatttaaaaattgattgtaattttaatttccgttattcttcacaaacttttgatgatgaaaaaacttatgaagctggtttaaatgatttttatgcttatcaaaacaataaatatattcctcagtatcttaaagatatgattcaaattaaatttaaagatgataatgatcctttattacaacataaagttggacctttctcaattactgcaccaacaagttctgtttggccttataaattagttactactttattagcaaaatgtattgaaaaaggtttaaatttacaaacttatacaactgttttaaatattcaacgtggtgataatgatacttggttagttaatactgaaagaggtgttgttaaatgtaaaaaacttgtttgtgcaactaatgcttatacaagaactttattaccagaatttaagggtaaaattataccagttaaaggtgttgtttcacatattaaacaaatttcaaaggaaggtgaagtaaatgaagatattaatagattacattataactattatcatacattcccattagaaggtgattatgttacaactcatagtaataattcaattattgcaggtggtggtggtaaaacttatttaccttatccaaatagtattgatatgtttaataatatggatgattcatttgctccaaaggaaacaattaattattttaaaaattatccaaataaattttacccagaatttgcaaaagatacaaaatttgaaaatgattatacttggacaggttgtatggcttattcgaatgacgatgtaccatatgttggtgatttaactaattttggtcgtaaaaatgttttcattcttgcaggttatacaggtcatggtatgccaagaatttggtcatgtggtgaatatattgcagatttaattacaggttcaaaggcaagtgatgttcctgattgttttaaacttacattagaaagaatgtataatcataaacatgatttattctctgatcttgcaggctatgatattaacaacagaggtaaatttaagttataaaacaaaaaaaattcgtaactacttttatgtatagaattcaaattagaataattaataaaacttaaacaatgttataaatatagcttataaaaactaatctaagcttgagtaatttcacccttaacgacaacatcaccagatctaccagttaagtgcattttaccttctctatcaatttgaataataacatcaacatttttacctgaaccaacaccatttaatgacattttcgcaagtaaagtacctggtaaatattcaacttctctaataatttctggttcttcttcttctgaatcttcttcttcatcagaatattgttcaggttcaacaacagtttccttaattgaacgtttaccttcataaaattcaatttcaacattatctgaattactttcaaaagaaatttgtttcttaattggatatgcagtttcctttgataaaattgttaagaaattaccatctaaatctttaataccaattggtacttgtaaatgttcagtattaataataattggttgtaaagattctttaatttcttcatcatcaaaatttgcaattaatgaagcttgaattgctgcacctctacaatttaattcatttggatttggtaattttgaatcaattgcaggtgcaaaaatttcagttgattcagggaaaattaatgataaagtatttgcaacttttggaatatttgaagtaccaccaactaataaaactgaatcaatatctaaagtttctaaacctgcctttttaacaacattttcaacaaattgagtcatttcactgaaaacttttctaccaactaattcaaatcttaatctattaattgatgacatataatcaaaaccttcagctaatgaatcaactgaaacattagcagtttgaatatttgataaagttttcttagtaatatttgaagcagcacttaattttgaataagatttttcagttttctttgcatctgctttaaatttcttttggaaatcacttgcaaagaaatcaattaatgcttcatctaattcaataccacctaatttattactatgttcagttgataataaagtcataataccacctctaacagatataactgcagcatctgatctaataccaccaaaatctgcaacaacataaattttatcttctaagagttgattcttgttagataaatgtgctaataaggcagatgttggttcattaattaattgtttaacttttaaacctgcatcatttgaaattttaattaattcagatttttgaatttcattaaagttagttggaacagttaaaacaacactttcaatttcttgacctaaataatcttcagcagcattcttaatttgttttaaatgtcttttaacaacttcattaattgaaattttattaccattaatttcataaccaactttaccattcaattcaattggatgtgcagcatattttgaatattctgaattaatttcttcaaatggaacaccaataaaatctctaaaattaacaatagtactacgaggatttctaataacttgtgcaagtgcttgttgaccatgatattcatcaccatcaacatatgataaagttgatgaaataaatctttcaccatctggattagcaataacatcaactttaccatctttaatggtagcaaatgaggtggtggagttaccaaaagcaataccaatagtagccattctatatattttctatcgttacttaaataaaagtatataatataattggaaaacttttagaaagttatattcatcaaggttaaaatttaccattaattaccaaatttgactgaaagatgaaaattttcaacaactcaaaatttttacatcatttcgaatcctcaatagaggttatttattatctacatgtatttttattatatgtctaagtaaatctattaaatctataaaactaagatcagagtataaaaccaacaccaaatatgaaagacactaatacaacaatcattaacgatcctttctccattgatgagatacctgattcatattctatacttgtagaattatgaaattgtctaattattgttccatttttcaatgataatgtttcaatatctgtaacattttgaatatcatatcttttaaatgtgattgattttgatttaccattaatcagttgcggtaaaactttaaattgttccatatcatcaaaatcatcgaaaaaatcatcagtcatttcattagtattttcatcattatcatgaatatgattagatgaatcatcttcatcatcacattcatgtgttttatgtttaataattgatttagttgtagttgttgtaacagttttagatttagttattaatttaacttttgttttaattgttgtagctgtagttgttgtagttttaataactgtactagtagtttgaggtgaattattaattgttgttgtatcagtattcaatactctaacataacctttattatcaattacattaacattaatattaacattacttgcagtttgttgtggtatagtatttgaatttgaagttaaacgagcaggacaatttaatccaactcttgtaactgcatcacaaactcttgaaacaattgcaaaattattatttgtaacagtttcagttttggtaaataaagtttcaacgaaaattgggaaatcttttgcttcaattatatttgaattaccattaccattaataattgcatttgccttaaatgataaatctgatggtaaacttgtaataaatttatctttaaaaattgttgtaaaatcaattgttgtacttgttataaatttattttcaacaattgttttccttgcaattgaagttgttgaaattgaaacatcaataagtatatcagtaactgttgtagttgaagaaataattctattttgataaattgttgtagttaatttatcaatttcagtttttgtttcagtttctttaattaattcagttgttgtaataaaatcataaattaaagttggtttattagttgctttgaaaagagttttttgaatagttgtagtttgaatacttagttcagtttctgtttgaattgtaatagaagtctttgtttctgttttagttttgtaaggatttttattctttttattattatcttgctttttattattatcctttttagctaacagttcaaaattattattgtcattatcattatatacatttttcaaatttctaaagtttgatagtcgattatttagaatattatcattattctgcatgttattatcattattattaatattattaccaatattattctcaaatccagttttaagtttatttttatttacaacctttctttcattactggatttcccattattaccattattattatttgataataatttaccctttaataatttcctatttttaattctttgatcaatttgtaacactaattggaaacaatcatcagatattatatcaatatgtttattattattaatattactattagatgataaattatctgaaatttcaggtgatttctctaatgaatttgattctaatttaattttacatactttaggatatttacctgaattaaattctaatttaaattcatcatatattgaattataagaatcaggtgaacaaagttcaattacttgttttgagaaactatcaattgtgtattctaaaaagttattatcattattaacgttatttacattattattattataattattattattattattatttgcaatatcatctaataatgtagttataatacttttcaaatcttctacacattcagtaaatgtataaggtattgaatatttcatactcattggtataacaggtaatttattatcctcaattttaagtttactaatatctttattattattattattatccttattattattacctgcatcaaccaaaagtataataaacaataagtttattaaaataagcaaagactgtttcattacaattataatttatagtatgttttatttaatctacaatgttgtattgtacaatgaaatgaaggtatagatggatatattctaaatagagaaaaaaaaaatttcatattgcccattttaattaattaattattcctattcctattcctataactaactacaccttttgttgtaattgttgttgttgcttttgcattaattttctcttttgctttgcctcaaattcatgccattcacctttaatatttttaaggaaatttaatggagaaattggtggatcttcattaaaataatcatgatttaaagcttcacttgcagttaatcttttctttggattcatttgtaataaattaattgctaaatctaaacattttggtgataataaatttttaaaaatatcattaaattttgaaattgatttaaaatttggtcttaaaatttcaaaccaaggtaatttataacaattattccaatcatttatatcaattgtacccattatatcataaattttccataattgatcaatttcattaataccttgaaaaattgcctttcttgtaaataattctaataataaacaaccaattccccaaatatcaatttctctaccataattagttgaacctaataaaatttcaggtggtctataccataatgttataactctatttgtataatttggatttaatttattttcatcaatatttttcatttttctagctaaaccaaaatcagttatttttaaaataccattattatcaattaaaatatttgaacctttaatatctctatgaattattctatttaaatgtaaatattgaataccttttaataattgattaaataaattttttttttcactatttgaaatttctatattattttgttgtaaaataccacttaaatcatgattcatataggggaaaatcatgaaaacttgatttttttcaaccataatttcatttaaaccaacgatattttcatgatcaaaagattgtaataaaccaatttctctatgagaagttattgggaaaccttctctctcagattctaatcttaattttttcaaagcaactaaatcatttgttaaaatatttttacctttataaactttgccataagtaccttcaccaacttgttgaatacgatgatgaatttgttgattttttgaaattttacatttaatcatatatttgaaaagtttattagtattggtataaggtgatttctttgaagtatttgatttattagctaatttagtaaatacgtcttcatcatcatcatcatcatcatcatcatcatggtcatcattatcattatcattatcatcgtgatcttcatgatcattacgattactattattattaatatgatcgtcgttaatcgtatccaaggtatttaagagagggtaactttccccagtcataccctttggaccagtaggtaattttattcttttattatagtaatcattattattattattattattattattatgttgtctccttgacataataatttaatatacacgagtgctagaatagtataaaatagaatagaggtgatgcaaagagcagaaaaactggtaataataataaaatttatcactataataacaataccaatgtaaccttccagcagatgaaaaaaaaatggaaaaatgaaaaatgaaagacacaaactgttaaacccgagactaatataaaagttcttaaatactaataccattgtgcatgtaaactctattttattttatttcatttcattttattatcaacaacgcaaatctattttcattatcaattatatttttttattttattatctatttggtgcattcgtttattatgcatgtatactctgttgctattttatatttatatttatctattttatctaatgacaccatattatactctctttaatgtctttaatgtttcccatatttattatatttctatttaatctatcttatttcttatcaatgatatataaatattaacgcgtttcacattaaagtttgctttgcaatcttttcttaaagtcttacattacaagataacatcaattttcattatacaaatgtcttgttatcaatcaaaacacgctaaattacaagcttttaaatataaagatcctctagctgctgataaattctttgtttgtgataaatctttaaaattatgttgtagaccaaattgtgatttaggtattttaaaaaatattaatatcacctccactaccaatactaccaccaataataatccaatattatcagataattttattgataatgataataataataattatgaatttttcaattcttataatgacgttttatcaaataattataaattatgtcaacattgtttcccaaatttaaataaattatcttcaattttgaaaaatgaaaattttgttataattgatttaaaattattattaaatacaattaaaaatgttaataaaaatattggtttcgtacctcctttattaggtaattcaaaagaattctttacaaaatcaattatgaaaatgaagaataaaaaattaaggaataaattattaaaatgtgatattgatgatattgatattgataatattgataatattgatattgatattgaaaatactgataatatcgataatgataataaatttaataatgataatgaatttactaatgattttaatgattttaatgaaagaaaattaaatccttctaaaaatgatattgaacatttaagaataattgatattgcttgtaggcatattgcattagctgctcaatcaactttatttggggttcaatttgtttatgatgatgataatagtaatactactactactactagtaagaataataatattaaagttaaaattgatagtggtatcaataacaataataataatatagaagatttaacaattgataacgaaatagatgatgaatttgaagaaaatgaatttgattttacttcatctgataatgaaagtgatgatgatggtattgttaatgttgataataataataataataataataataacatcagttatgattttgatattataaatagtttaaatactttaagtgattcagataatgatgatagaagaggttcatttattgtacatcatcaaagattgaaaactaaaaaacgtagaggtggtgttttaggttttaaagaattagctgcaaaatcatttttcagtccttggcattttcatagaacttttaaaaatttaactggtataacaccaaaacaatatggtgataaatgttttaaatatttaaattcaaaaaaatttaaatatattaaaaatttaaattcttcacattcaattataattaatgcaaaattagcaaatccttcatttgtttctgatttccaatttaaaaatattaaagatattaaagatattaaagatattaaggataagaaagataaaaaggatattaaggataaaaaggatagtaaggttattaaagagaatattaaggataagaaaattgaaattgatctatcaattgataataataatacttcaaataataataataatctattctctccaccaattttatacagtagttatgggaataatattaatcaaaatcaagatcaacatgaacatgaacatcatcagctgcaacaatcatataatcaacaatcatataataattataataaccactattatttaagacaaccattattactatcatcaacatcaacatcatcaaattcaacatcatttacaaatacaactacaaatactgaatcatcaatattttcaattgaacaatcaattccatcatcaatttcatcatcaccaattgaaaatgatttttataatttaaaatcaaatttaaattttacaaattatgaatacgataataataataatgataatactattatcgatagtagcaatattcaagaatttaagaaattagattattattcaagtttacaagaattaccgataactaataataataataataatcacagtactaattcattattacaaccaattcaatttcttaataattttgacgaatcttttgtaaaaaatgaggagaatgatattgatattgaaaatgaaaatgaaaatgaaaatgaattagaaattgaaattgaaattgaatctggaataacgaatagattttgttatcaaaattcgaatacgaaaagtttaaattattatgatagcaatttacaatataataataataataatagtgaagagtataattacggatatatgaaaagttcaaattataccttattcgaggaacgaatttttaattaaacaacttcaattacaaaattctttagaaaagaaaattaacgaaaaattaaatttattatttgatgatgaaaatgataattttattgtataataataaaaaaaataataaatgtgtataatatgtataataattgtaaaatagaactcaaattaaacggtttatggtaccaattacgttatatattgtacactaaaaaagcaccattataatatgaattatggtagtaaaattaagtgacctaggtattaattgatcacaaagagttttattaatggattcataaataatgctaagaaattatattcatcaagtttagttaatacaatttaaggtattataaattataatagtattattatatgataataggtaattttagttttaataaggttttaacttaaacggaatttagtgatgaagtagacgaatagatttttaagcgttctagaatggcatgataattgataattaaagttttcaaagtgtgtcttaaaatgtgggtattaatatagtgaatgacggtttttgagttttttcagatgggacaattggaaaaaaaaaaagaaacgaaaagaaactaaaatttgatttacaagataaactaagataaataaacaataggggagaaattagaaaatagacaataaaagtgaagttaaaattattcaattgagatgacgttaagtttcagattaatttaagaacaattacatgaaacaatgtgaaacaataaataagaatttaaaaattaaagtataatagaagttatagctaatactatatagtataattagaggatattgatagagtgcaggaaatattagttcataaattggtaaaatacaagaaactttaatctcttaaatttatgtatcaactgattgtttaaattaatttattaaagattatcaaagattatcaaagataatcaaacaatttcgcaagtcccgatgaataaaaagatgcattagagagatagaataaacaataggtataagagatttcgggattatattaataaaattattattttattattattattattattattatcattataagtataaatcagctgttagaactgtttatcccagggctggattacttaatttaatttaattttatttaattttattttattttatttattgcaaataaattattattttatattacgtaagatatattacgtaatcaattacatatcacgtgatcatatattacgtaaacaatttattttatgttacgtaatatttattacataagcaatcattacataatcacatgggaaatattaattataatagaaaaaaattttttctacccgttttctaaactaaacaataatttgtcttaatgtgtcatgctaaataatctgatactaggttttattgtataatctacttctaattctaactctattcacatcgtatataccttatactaataatcatttatctattatattatataatattctatcacaaagttaactgatataaaaaacttataaaaaaaaaatttcttttttttctatttctatttctatttttatttaaaaatgattgatttaaatatcaatgataagaatgatcaaatttcaaataatgattcaaattcaaataattcttcttctataaaacctaaaactataacaactgaattatttgttgaaaagccaaatgttggttcaattgatcatttagcaattagtgaatctttaggttatcaaatttttagaaaatcaattagaaatgcttggaaacctgatgaagataatttattaaaaaaattattaattgaacaatatttaaaaattaataatttatcaatttataataatgaacaaattaatattaaagatattgattgggttaaattagctaataatatgaatacaaaaagaagagcaaaagaatgtaggaaaagatggattagttcattagatcctttcattaaaaagggtaaatggactaaagatgaagataatgaattagttaatgcttttaaaaaacatggtccaaattggaataaagtttcatctgaaattaaaggtagaaatgaagatcaatgttctaaaagatatttagaagtacttaattgtgatacaaaggaaagattaagaccttggaaattagatgaagatttaattttaattaattgtgttaaaaatattggtacaaaatggagacaagtttcaatttctttacctggtagaccaagtttaacttgtcgtaatagatggagaaaaattatgaatgatattgcaaaagatactgctaatgatataattaaaaaagctgttggtgtattagatgaaaatggtattccaattgttaaatttacaaaacttgataataaacatggtaaaaataataataataataataattcaaaaattataaaaaatagtaagaataatgataaaggtaaagataatgatattaatgaaaaaaataataataaaaataataataataataaaattgataaaaatgataataatataattaatgagaaaaatgattcaatcactacatcaagtaatgttgatgtatccccagaagatattcaagttgatagtccaataataaatgataatttttcaaaattaacaaacaataaacgacctattgaatctattaataatgaacaatcttataaaaaatttaaatctgataatcaaaaaactgataataatacaaataccaccacaactaataataataataacattccatttgataattattcaacatcatatacacgaatagcaacacctttaaaaactcaaacagattggaaattttcattaattgatccacgtacaaatgaagaattgaaagattataatggtaaaattgataatcaagaattagctcattatttaattgaacttgcaagacttaatggtgttgcattaactgttcatcaacatattcatcatcattattctccaactcctgaaaatgttaatattgatcctcaagcaaatattcaaagatatggtcattttaattatttacctccattaattgaagttccaaaattaagttcatcttcatcacctgctaatacaaatgattcaaataattcaaataaaacttataatgaaagttcattattaagattattaaataataatgaagatgataaaattaaaaataagaataaaactagaaatggaaatattaacaatgaaaaaaattataataaaaattcaacaaaagaaacttatttatcttctcaaagacaacagcttttcccttcaacatcaaattatataacggcaaattctccttcaactcaagctactaataatacttcaatcaataattcaattaataataagaaaaatgaaacaaaaactgataaaaagaaagaaaataataataataataataataataataataccactaataaatctttcaatacagaagtactcgaagaagaattagatttttgggaaactatgagatcaaataaaccagtttcacagcatcatccattacattattatcaaccatcaaattataaagaacaatcaccatatcaaacatctgattcatttggaattcaaagattcccaaatatggcaactccattagctgcaaatatgattaataatgataaaaatattaatttagttcaaaataatgtaactaatttaaataatgatcatggttatggatcaatttatttaaatggtgaagaagttaatgaagaagatgatgaagaagaggaaattgatattgcaaatcaatatggtatgtattatagtgtttttgcaaataaaagtaatggaaattttaataatttcagtaagcaaaataattcaaatgttaataataacaataataatggaccaactggtttaattaatagtggttatttaatgccatttaatccatcataatattattttctttttttataaaaaaacaaatatgtatattagaataagaacaaatttaattaatagaaatttaaataactttacgtataatatattttatagaatttccaagaaaaagaacagttatttaatataaatttatataaagatgaatagaatgttgattagcaaaaaatgaatgttatgtgtacgtatttagtttagtacagacctttaacaaagaatctagaatttctcataaaacttgcagcattatcataaacataatcaccataatcaagatatttatatgcataatattcaacatttggttcaccaattaatccaatatttggagttacaccagtatttttcttaacacctgataaaaatcctgcaattaatgttaaatcaactgcaacatgaaagatttttcccatctataataataatgtgttagtatcattctaagttattattaaattaataggtatacatacagccattatattgtttagattatctatattttacaaagagaacatggattgacattatgatgtccctggaatctaaccttgccttgatcttagagattcaatttttggattacgtaatattatttttctaatgagtttacttacagttagttacagttatatgttttatatatttaatatgttttatatatttaatgaatgaataaacaatggtataataatatagaatagaatataataatgaatgaataaactagaatgaatattcttcagagaagaaccgacatttttctttggttgcaatactttcacatcttttattaagtgaaggtggaccacatgaaacaatccatttatttgcataatctaatgtctttgataaacttttctgtaaaatatcttcaagatttggtctcttacctacaattgcagtatttgcaaatttagtttcataagtatttaatgaatctgatgaattatttgataattccattaatggaactgcagaattttcactttcttgcatatcaatttcatcttgttcaagtatatcctcattaattccattagttatataaacatcaacaccttgaatatttaaatcattaagaataaataaatctttttcatcctttgttacccaaataaatttgattttaatatctttaccatctgcaacaattgatcttttaaaaaattcaaataaaactaatcctaatgaaatacccgaaccaccacaaacaattactatattttcagcagttagaaagaaattttcattgattgaagatttgaaatttgtttgaattgaatatgtttcaaatggttgtaattgaaattttgtatttttaacaattaatgttgctaataaatctctattttcaaatgttgtagcaacagtatatggatgtgatggtaacatgataaaaaaaggactccatttacttgcacctattctaacatgagatccaggtaaatatgattcaggtaataaacttttaggaaatttaataattttataatcacttcctggattttcaataatttcagttattgtaatatctttaacatataagtatttacgaatatattgtgcaaataataatcctatacttatgaaataaaatagactaacacctggtcttgcatgtaagtatgttaatgtaatataagttaaaaaaaatatattgtggaaaacatagaatactttataattgagatttcttattggtttccaaaaaatcatcattataatacctaagataaaaataataactccaatgaaattaacaggtctcaaaactttctcaagcgtgttgttaacaacataatagattaaaaatccaattccatggaaaacaccaagtaaaacaataattcttgaaatccatttatgtaactgtaatgtgttcaaataattatcaattggaaaccaggaaggttcagctgccaaaaatatagttaatggagttaacgtatatgataatctacccattcttttaattaaaactgatattttctccaaatgaggcttaattaccattaaaattgcaattgttaaaactaccaatgaaactgtaatcggaagtggtaatttactaattcttagattacttgttgatctacctgatcttttccaagatctattataaaactgaagtgcagataatctaattattatgaataaacatgatagtccaaatagtatataaccatatttaatgttaactttatgcaactggattgtgtcttttcactaattgcaccacatcattcaattcccgcaaattactctctatttgagtcattgtctaatataataaaagaagatagcagtaagaaagtacattaataatgagcagattaatcaaatcatcgagaattgtaataataattgtaataattttcaaattatgatgtaagcaagatacattaccgcattaggcgactaacggtttacttttccagtgatgggagcagaaaaggggaatctttgactttgttagatgtagatacaccatattcttcttgttttactcttgtaagaacatatcagtaactaaggatagatgttatattcagtagtattaaagtctgtagtattgactttattaggagctgatctagttaacgcaggatcaccacctgcaactgttttaaaatgtattaatattaaggcttcggaatgtttaggtaaacatgcagattatcaatgtatttgtgatgataaacaagctattttagaatgtttagcaattcatgcaccttatgggaattatttagaggcaagggatcattttttaggttcttgtattgatagattccctcatttaattgatgatccagattataatatgaaattgcctaaaaaacgattaacttcaacaattagctcagaaattatgacaagtacaactattaaatttacttcaacaacttgggatcctacaactacaattgttgatccaattgtttcatcaattccaagtttattgcctggtgatgatgaatgtgaggatgaggataatgaaaatgagcttgaagatgatgatgaagattgtgaatgtgaatgttattgtgattgtgatgatgatgagtatgatgaaattaatgatgatgatggaaataatcatgataaagatgatgataaagaggaagaagaaggtgaaaaggtggatgatgatgacgacgaagaagatgatgataatgaagaagaaattgataatgatccacaattagaagaccctgaagataaagaagatggcgacgatgaggatgacggggataaaaacaaagaggaagatgaagaagatgaagaagaaggcgatgatgaagatgataatgatgatgatgaagataatgaagaagaagaggaagaagaagaatttatcaatgatgatggatgcatttgcacatgtaaatgtaaatgtaacaagaagaaaacaaagaatccatttaatgataatgaaaatgattccgctgatgataatactaccgaagagagcaaacttttcacagatgatgacttttgggtttgtaataaccccaatggatgctatgaagaaaacgatgatgaagatgaaactgaaattgtcgaatacttggcttataaaaaggaatatttaagtttaccaaatcaatatcaatatggtgatttagaacaaagtgaattttggtctgaagaaaagaaagcaagagctgatatcttaaatcaaatacaagaattaagaaatcaaaaaaatggaaaaaaatttagtaaataataaagtcaacagtaaacaaaattctaaaagtaatgctatagatttcaagtttgctagccctgaattaatgtttaatcaacaaaagaaaaagagagatgaaaacttgattgatgatacaccatataatgtcaaatccttatcatacagaaaatcaaagaaaaagaatgaagaggatagtagaataagatttggttcaaattttttcagaactaaaaagttaccaaaggctaccattaaggaagaagatcgttgacttttgtaatttgctctttcataatttttgtatcgttgttgtaatttaaagttctatatcaactttattccctactgtttgcaactgcaacagccacagtaacggcttcaacggcttcttctaattctttatcattagatttatcagtttccgagatcaattcatcctgtattgccttaacatgcaacaatactgtatcattttcatgttcactttcatgttcactttcatgttcactttcatgttcattttcatgttcgtttatattatcatttcccatagttttcacttctatttctctctgcaaatcttcaacagaagctgaaatatcttctttactcccggtataatcaatatcaatgttttctatattgtttaagtcaatggcatcaccgtcatcgacattactattttcaccatcaatcacataacttttttcattctcaaagtaattattattgttactctttacagctgattcattatccgttttagtatccagaatattttgagtagtaatctcatcatttgtaaattgagttagttgatttaattgatggtttaattgagagtgatcacgattgaaagattctgtcagcattttgatatgtttatcagtattatccaatccaaactcattattgtaagcatcaataacattttcaaatgaatcatctacattagaataaataaagtcagcatctatttcatcattaagtgaattttccttatctttatctgtatctagagatttttctgtattgttatttattgtcacacttctctttttaggtttatcaacatcacttaaatcaatattgtcgaaaccttccatattcaactcatcaatatcagtgacaataacctttgctaaatttattaaaccatgattgtctgttttattgaatgacaaaccttctcctatactaatacttgtctccataacaggtttacataatcttttcctagatctacactctgaacaaactttgaagtttctctcatcatttgataaagtttttgaacatctattacaagcaccttgcatctctaaagttttccttcgtaatttactattctccctgcatctttcacaaactttatacatatcttgattaatattaggaccagagcaatgaatacatttaccttccacaaaacgatttgatttccaagatcttaacatctctcgacaatgtagacatagtacaaacttacctgaatctggtggtaattcagttccacaacgagaacaaacaccatctttctcccttgtttgtttttgccatcgtttcgatctttctctttgctgtatcctacaatgttcacacattttgaactgtttcactcccatttgtgcaaaatctttcttacatctattacacttacctagggggaatttctgcttgttttcttcaagcatatcatcacaaagggtagcctcatctttattattaaatttaattgttcgaaaaggactccccacatccattatagtgatgccattatctattattgaagcagtaaagttgtagaaagttggttgattaaagaataacatcagaaaaagtgcttacataataaacgtataatacttctggcacatgcacctgttgaattctttgcttaaactcccctttctttaacactatcattaacaaagaaagtacaattaaatgcaaacagaagctaaatatattgtattagatattgaaggaacaatttgcccaatatcatttgttaaagatgagctttttccattttttttaaaacaattaccaaactatcttgataagtacagtttcccattagaagatagcaatgaatcaatggatgatatcgaaaaaatattgattcaatttccgaaggaagctaatcaaagcaaagatttaatgattgaatatattaatgatttagtgaatagagatattaaagatccagtgttgaaacaattacaagggtttatatgggaaaatggttacacaactggatcaataatggcaccattgtttgaggatgcaattgaagcaattcaaatattggtctgcattgtgctgaaggtgtttatatatatagtagtggaagtgttaaagcacaaaaattattacttggtaatgtcaaaattgttaatgaagtcaaataattccattgaatgtgctcaaatgaatggattaatcactgattattttgatactgtaaatatagggaagaaaacagagaaggaaagttatgaaaagattttaaagaagattggaattgatgaaactgactgaggaaggctaagaaagaagttttatttttaagtgataatccattagaagttaaagctgcaattgcttcaggaatgtcaagttatattgttgaaaaaccaggaaattatccattatcagatgaagacagaagtaaatacagagttgttactgatttacataccctcttctcatacgacgacgaagtaggttcggtatttattaatgacatgtgtaatatcttaaaattaaaatacaagtttagtaaaacattctttatatactaccgccaataagaaaaaagattatacaaatatatacggtttctaaaagtaattaactgatggtagtagtataagatctattagtaaaaagattggaacaatgaatttaaagtgcatgatcattaaataacaaatttgctgccatttcttcatttttatcacaagcaaaataaacttgaataactaagtttctttcaaatcctaattcacataatcttgtaattgcagaattttcttcttctgtaacaggaattcttaattcgtttgattcaccttcaccttcttcaccttctgcagattcaatatattcaggaggaatacctagagcttgcgcaagagcattttgatcaccttcagtaatatatctcagaaatgcttctggattagattgtattaattgtgacatttgaggattacttgcagctaattgttgtaagacaacttccgccatttctggttgtgattgtaaaatatctcttacttgactcatcatatcaccttcttgtggagatgcaccattacttgcagctaatgctgcttgttcgaataaattaccagatgctgttgaagaggttgttgttattggagctggtgtttcagtggttgcttctgtggtagtagcatccgcagtagcttcggtagtttctgcacctgtagtagctgctggtgctgcttcttgtgctggttgttcaacaggttcagcaggtaatggtatacctgataataaatattcaacagctctatctggattattgaaagcagcacgaagagctctttcgacttctgatctttcaaaacccatagccatgatattttgaatagcagtttctcttacattaccttgtgcaaatgtggaaggggtaaattcagcaattggttcattagttgcagaagttgcaggagttgtagctgcaggggtaggagctgaagtttcagtatttgattcggtatttgattgttcttccttcttttcagtagattcagcagcaggtactggttcagcagccttcttagcctttgcaatcatgaagataatttgatcaccttctttaatcttaaactcttcaaagattttgtcattttgtaatattttacctgaatagacaaactttatttgatctgcatcacaatttttgatggaagcaagtttttcttttccagaaagaacagtttctgaaagttcaatttcaataggaattttttccttcttaaagtcctttaatatgatttgcattgcactgtttcaatgtgaaaagatgcaaaccacggtggcaaatttgacatcatcaccacaaaaagttcaaaattcaaataatttcccccaaacgcagaagccttcaaaaaaatttcagctcggaaatttcagtacaaaaaagtaaaaaaatttctcggaaatttcagtttgaaaaaattaattctcttcatttactcctatactgttatgacatgaatttgaaatagatttagaaaagataaaatatagaagcaagagtatataagaagggaacgtaaactcaactgaactcaatacatcttactacactcattaagttgaatgcccgatctttctgttttacacaacttcccccaatgggagaaacttatacgagatttggatgatgatatctacgattctaaattatgggatgacttaataacacatcatgaaaaacttgtagaaaatcatactgaattaataagatctagaaaagaattaagaacaatactatataatgatataaataaacttctaacgaaattcccatactatataatatactggaaacgatatcatctaatagtgaaagactatcgaaggtttgcatgcttcaattgatattttaaaacgtgctgttttaatatgttccttattcactagagttatggatggattatattcaactgatactcaatacggaaacttataagattagagatactgaattgaaattaatttttgaaaaggctagtaataaaattggttatttttttacatctcatgatttttggaatacatatcttgattggatggcaagtaaatatggaatgaactcaaatgattatatacacgtattacttaaagtgataaaattacctcttcatcaatatgctaaatttaatagtaaattccaacatgtgtataagaattttgcaattagtgatcttataaaggatgcagatttgcagcaattcataaatgaaaataattactggtcaaaagatgaaggaactcttgaggattttattgagaataactcagaattcttaataactgaatactttaaggtacaattagaggagatcaagagacggtcaaatgaaaaatggcagtatgagacgaatttgaaattagattttgatttaacttttatagctaccgaagagatttgtaaatggctagattacattgaatatgaagaagactatcacagaggtaaaggtcaaattgacaataatccagaaatcattaatttatacgaaagagctttgttaccaacatgtttgaatgataaaatctggattagatataatagatacttgatacaaaacaatggacctaaagaattaataatatcaaattttaataaagcatgtgatcattttgttccaattgatatgaaagatatacgatatatgtatataaaatatatgcaattaaagctaaagaagattgatgattgcaaaagtatattcatgtcattgattgaaaagctaaatacagactctgaaatagtttcaaagtatattgatttcttgattgatcttgaagaaatagaagaaaataaactcagtttgattgaggatctaatcaagtgtgttcatttattcaacaaaaataatactgttgttgttcatactgagaaaaagcaaaaagttgcaaagaaaatcgacgaaagtaaagttgctaaggaaactgacctaactataaagtctgaggatattgccatgctatcatctatgcttaatttttggacagtaggtgaattagtggtgaatgtttgcaaatttcattggtttaagttacacaatatcaaaaaaaccagagagatcttcatgcttttttttaatacagaagctgttcgaagtagtaaagcttattggtttgcctttttcaaatttgaactttctcaaagaaacaagaagaatctaaaacatataacggataaggttaaattatggagtacattgagtatatcagatgtcaatcttattatttctgaatataattcttttgctttgaaaaattttacacttgcagagatgaaagataatgaaagagatataattaaaaatattttagaaacagatgaagaatcttctcttcatatgaaacatttccttaaggttagattagcagaggataataatgaagacacagttaataaaagattagttagagaaaatggccatccatcaggttcaagcgatggtagaccaacattgattaatcctatactatactctgataatctatctgaaattgatattaaatcattcccagtaccaaaattcaggaatgttgaaaaagctaataataatgtgaaatttattcgtgaatctttatagtgtaaatttaaacataaactaatacaaaaagaatatatagattagagtgtacaatatattgtttatttatatgacaagtttttaaatactatctgtttgtctaccgataactgttaaatcttctctaacaagggctttctcagtacatctgttatcaccgtaaacttctaaaattttcaaagcaggacaaattcttgaaatgattgctaatgctgaatcatcaacagatcttacaaaacctaaatctaggtattcaagtactgggaatgttaaatttcttgataatttactaaacattacctttgaaatattttttacactattcaaattcaaactttcaagtgtctggtgtgaatgattcaagacattgtaaatcgatgcatcagttaatgagatacatctttcaaaattaatattggtcaatcctttatttatattccaatctgcaaacacttcgttcataccatcgtcatcaatttgatctaaatcaattaatgtcaaattagttaaatttgctccaaatggcttgataccttcaattaaaaatttatttgttaaatgtgaacatttatttagaatcaatgtatgtaaagtttcacaattaattgacaataagttaattaataaatcatcatcaatcagattttcgttatgtggtgatgatatttcctaaaaatttcaaatttggtaaaaaatgtggtaataaatcatatacaggtttagaatttaacccatcaagtcttgataatgataatgattcaagattattaccacagttttctaataatgaaactaatgaatcattggaaaatctatgggtatttttcaaatgaaattttgtaagatttttagcagtattactttcaaagaatgattgccaattatcatcattaatcaaaaatggaccatccaaagttaattctttgagattagataatttattactaaaatattgtaaattatcattatggaattgaccacacatattcaaagttagggaaactaaatttggacaaaatgaagctacttgattcattttatttttatcaattttagaacaatcccaaaattcaagttcagttgtattattatctaaaaatagttcaacagttttattattaagagaacgatttttggctaaaattctacaaattttcattttattatgattaccaatttcacctaatgcattaacgtgatcaatattttcagtaataacagtgaatacaaaagtcttgtaatgaaggtagcttaaattgttttttatctaacaaagcagcagcaatcttctttcttcttttcctagcttcaatttcatgttttttagccaatctttctcttctaatttgaattttagaacatgatggacataagtaaccaacgcgtcccgatttttcaatcttctttgaatatggtgtaactgtaaaattttgatcacattctgaacagaagaggttagtaccagtggtaggtgtataaggagaatcagttttctgtcttttactatcattttccactacagtttgatcagtaatttcttcttcatcggaatcaagggcaaaatttaatgcaatatgggtatcattatttttattattattattattgttatcatcattattgttattaccatcatcagatccattaactggaatattattagctgtatcatcattagcagcttctaatgcctgtgattgttcatatctttgtctaatttgttcagcattaataccttgttcacgtaaaaaagatgttaaagcacttgaaggtcccttaacaccaccaccatcatcaccatccagtggctgtcctctccttctacggaaacccattttctacttatctataacctcctaaagaaaggaactcagagaagaaagaagtgaaataaaagctgatacaaagaaaagacctgaatgaaattcatgttaagccccacgacccctatttttgtttgcatggcccatataatgattgttgttactgtacaacttggtgtataacgactaaaactgttccttcttcaacagcgtgtgttctactagtgatatagaggtttattactctataatacacctattcactaacccactatttacagtcccaaaattaaaatcaatgccagcatgttgttatcagtaacggaacattaaaattcccaataatcggcggcccgaatccactccccagtgggaaaagcgaatgttttgataaggactacattaatatagccattcaaagatcgaatcatcgcttcatctgctttgtttacctgattcaatcggagtaccgacttttataccccttgaaattcccttggactggctcgttagttattgcatcatacaaatttttcatggaaggttaaaataaaaaggttgaataatacagatctattcgaaattttcatcatatcaacataatacagtagcatattatatacaggagaactaatgaagaatcaatttttcaaaggaatataccgaagacatggtgcattcaatctttatttacttgcattcttactttcaatatcagcatgcctatcattaggtatattgacattgttctccatatttgcagaaccattacaaaaaataatgggatattcacaatcaactataaataatacaattatctttcaagttcttgggttaaatttatttacacctctaagtgggtatattgcagatgctgaaggtatttggattttatcaattatttcatttttcggttatttcattggctttaatacaattataatgtcaattaataataatcttgataagaaatacatttatctaagtttctttatcattggatgttcacatatatcatttttgtttggatgtttactaaattctgctaaaactttagggagatattatagaacaatggctataagtacaccaaatatgatggttgcattttcatcatatattcaaatacaaatattgaaaaaatatttccaaccaattgataatgatattgttaatgttaaatctaattttatcagtttcattgaaattttttatgataactttaatgatttcatcatttatttcattttttgcatgtaaattaactgacattatagaatattatgaatttgatgaagaacaaattgacacttccattcatgaaagttttttgagttttgaaacttcaccattattaattggggcaggaactgttttacatagtcctgaaaattcaattattggttcacctagaagttggtatgatggtgaaaattctccaatgctgaatttagatgatgaattatcattattatcgtcagaatcaattaatcaatcagttccaacatctgatggtatacttagaataatgagctcatttcacgaattaactccttataaaatcaaggttagaaattttttgagtgatcctttaatgtatccattacttatgtgttgtttaatatcaattggttcaactgaatttttcattgcaaatttaaatacaattttaacaaatttaaatctaagtaattatttagattcaaatttacaattattatcaatttgttcaacaataacaagatttatcattatgatttttacagattatatctgtacaagatttcaaatttcaagaattacaatctttacattaagtgttataatatgtggaatttcacatatttatcttatcaagtatacccgttacctcaattaattttcaatttgtaatgattatgaattcaattttaaattcagcagttttcacattattccctgcaattttagcaagtatttatggtatagagattttaggaacaacatgggggttatgttcaagttcaagtatttttggtaatatgtgtttaaatttaatgtattcaattgattttagttcacattgtgttggtaattattcaaatgatttagtgatttgctcaacactaacatttttcattagtggatcatgtttgatactttttcgggatttatagttttcttactacgccaaaggtatctacacaaatcctctgcatttttttaaaatagattagattagattagattaaactagatcatcaattttaagtttttttatatagatcttaatgattaatgattaaagatagtactaagataatctgtgtactgtattacgtaatcttatatttgatttttttaaccttagaaattcttatcgttctttttttagttgcattgctgatctgaaggcttttgatatataattttatttattttattttatttcccctggttagtattacacttattacaccgcaaagatatcctaatagttacaaaacttaacatgtctgcagtgtcagatccaatcgaacaatcgaataatgcaagacttattatcaatagacgaaccaatagagaggtctactacaacaaatatcaacgccaccagtacggaaataggaaaataatgataatacaattgtggtaaatgatgagaatagaatacgaaacaatacacatataacattgccgacagtgaatgaagaaacagttagaaatattgatggaactatagaaacaattacacaacaagaagttgaggaaccatattggcatgatgataaattattcaatgaatgtcaagaatgtggtattaaattttcatttttcattagaagacatcattgtaggaaatgtggtaaaatttattgtaataaatgttgtgggaaatattgtaaatatattcccggtagttatgttattgaagaatctggtaatgaaggtaaaaaattagttagtgggatgtataaatatttagaatttaggacatgtgattcatgttatgaagaaattaggatgttgaaagaagcattagggataatagaagaacgagatgagaatagagaagatcacaatgaaactgatgacagtgatgatggagaaggtgatagggataatatagatgaaactaattcaaatgtagatacgataaatggtattaaacattcagaaccaagggagattacgatggaaattagcgaatctagagctggtacggaaagtattgaattaggtaaagttgaatgtccaatttgtggaatagatataggagaaaaacctgaatctgaaagggagagacatattagtcaatgtttaacggaacatgaatttggatcaccgaatacgaataagggaggaggaggaaccgaaggtggaatagccggtagacgcgataagaacagaatgattgtgtataagttagaagataaggataataaacttgatagtaaagatattgaagaatgtgttatatgtcttgaagatattgaacctggggatgttgtcggtagactagaatgtttatgttgtttccattataaatgtattaaagactggattaaccgaaagggagtatgtgaatgtcctgtccactcacttatttgatataatatagaaatagcctttgccaaggatcttaattaaaccaaaagaggaaataaaataaagtatatcaatttaattaattaaagtttacattatactctcaataaactaaaaattagtgcaaaattagtcaaatttaccagcctcccccagtggaatgtctattttacccattgagggttttatcggcatacccagtattttccccagataagaaatttcgcgtttaaaatataataggaatcgtccagaaaaaggaaaaaaggtttagtacacgtaagattttcatattaaggtttggtgttttcaaggagaattgatatagtttttttttcagggggttatttcaatttatgccaattatatcaagttttactattgttattatttacgggtattattaattcaaagtacagatttcaagtttaacttagacgatgtcgtgcaactaatatggcctgctttatttcgttctgcttgatctgttttaaatttttctttttactctttttatcttcttttcaatcttaactctcgttgctttatcagttcaatcaatattaactaatcatggaatcattatggctggatgatcatggatcaaatacttcaatacttcttcaaatactttaaaagctttaaacagattacagagtgaaaaatttcaaagggggttgaacaaatttattaaagcatttgataacaataatagtaatgctaataataccaatcaactagctaataaaaagaaatttagtaacttggtaatttcaaatcctatatcatttacacatgtatctcatgtggatccaaattttacatttggagttgaaaaatcattcaatagtgttgatccaaactacactaaataacttattaccagtaacgggacaacaagagttagaatatgaggaagaaatacaagtgtttgacgaaatagctaataataatagtaataataataatgatgatcatgatggcaaaggtgttgatgaaattaatgaaattcaacaaactacattagatccaggacttaataaaattcaagcattttcatcatttagaacaagtccaacagtcaatttaccacattcacattccaaatcaagttcaataaattatcatcataaaagaaatagttcatgttcaacatcactaaatatatcaaatgaatcaacatttacctaaaagaactagttattctgataattcattaatttcatcaactggttcattgaaaaaatatactttaccatgtataccattaaatgaagtagaagtagaagcttgaaaaggatgttattcctgataatgaagaattatcatcatcagagaatgatgatgaatttgttttcaaatttaaatcaataccatcagcacctccaccaccaatggaaattctagaacctgtggaaagattaaaatcaattatacaaaaatttgaagatattgaaattgcatcagattctgaagatgatgaaacttttacaccattaacaaaatttgatatatcatctgaattattaaataacaataagaatatcaataataatagatgtgttaataatagaaataataataataataataaaaataataataatagtaatagaaattcaataatacagttatttgaagatgaaaaagatagtgaatatcttatgaatttactggaaaaatcacaagtttcattgcaagataattttgcgataaaaagacaatcaattttaaatgtggtattatctgaaataaccgaggaaacagaaaatgatgctgatgatgaaactgaagatgttaaggaaaccaatataacaaatggtgttgttactacattagatgttgttgctgaggatgaagatgaagatgaagatcaaacttgtttcataagtacatctccaattacgtcagatttttttagtgacattgaactatcagatgttgaaaatgaaaacaatatatttgcaaatattgatgaattattctgataagttctagacaacaaacaaatttttatattagctttaaccaaattgtatattttcaccctgtatttttataaaccccataaacaatcatttccattatatcaaagttagctattttataataagtaaactcgggatttagataacgaaacaactaaaatttttgaacttcgcaatatgaatacgaaagagatttcccatctgctgatctaacttctttttatagtagttcctcatatgcatatatagacaacatggttgatcagatgatggtagctaatgcatatcatgaatataattgtgcatatgataaattatatgaatcattaagaaaatcacaaaatttattaaataaaggatttttatcattaaaattaactgaacgtgatgaaattaaatactcattaattgatacaaaacgtaaatcattaatcaatattcgaattaatgaggatgatgtggataataaaggtgaatttgtaattgatattcaaagtacgttaaatgatgttaaagagaaggaaacagaaaatgacgataatttacataaacgaataggtaaaaatggaattgatgatgataatgaaattaatgaaattaaagaatctatagaggtaattgatccaattaaacttatacatggaggttttacctcattaagtattaaacaatcacagaaagagagtaaagatgtgataattaaaattattgatgtaattaataaaagacaaaatttgcaaaatttattagatgaatgtaacgatagtattatatagtatagaatgaatgaattaataataaattaatcagaattacttcttttaattgcatcttgaactaattgattaaaattagcattcaatgaacaataactttgaactgaaccaattataactaatgcaattgttgaaccaaaccataaaccaattaaaccacttggattttctttatttggtaaacaaaatgccatataagcacctaatggtaaaccaattaaataatatgaaattaaattaacataacctccaattttttgtaaaccttgacctcttaaacaacctgcactaattgaatttaatgcatcaaaaatttgcataaatgctaaatatgggaatgtttcaactgcataatgaataacttcttgatcatttgtaaaccaattaataattaattttctaccaaaatataggaatgatgaattaaaaattgcaattatagctgtaaaaatgaataatgttttacaagttgtaaaagcagaatttggtaattgagcacctaagaaattagcaattctagttgataaagcaattgaaacaccataaggaatttgataattaagtgatgccattgttgctaaaattgattgagcagctaattgagttgtaccaagataacttgctaatagagttaaaatttcaaatgataaaaattcagacataatcataattaaatttggaattgataatttaattaaactaccccaattacgtatcactttctttgaatcaaattttgtccaacattttaaaggatttaatttatttttagttttaacagtatataagtataatccgaatgccattaaagtataattaatactaacggcaattggagcaccaatataaccaaagttgaaaacccaaaccaataaataatttaaagctgcattaagtggagcacaaacaaataagacataagttgaagcatcgaaaataccttgactttgtaagaatcttttaccagtttcaaataagatataaccaggtataccaaagatgtaacttttaaatattgagcagcataaattgcggattgtttatcaggtaaaaaatgagttaaaactgattcagcccaaatccaccaagatatacaaacaaagaacataattgtgaaaattaatactgcacatctttggaaaataagaccaactaaatgatattttttagcaccataagcttgaggtaagaaagtatccaatgaagaagctaaaccagcaattgttgcaattgcagttatatttgaagtcattgcaccaagagttataccagctaaagcttcagatgatatatgaccaactgcaaaaattgaacaaacagataaagaattttgtaataggaaagtaataattaaaggaaatgaagatcttgaaaccgattttaattcaaatgagatagaagttttaattttaccatttttaacagcttcatcccaagattcaatgattgcatcttcatcaattatttcattttcatcatcaaaattattactattattagtgttattattagtgttattattatttgatggtaatattggagtattttcattagcaataattgaagaacaagtacttgaatgtttaataggtatatgattttcctttaataaacttgcttcttcagataaaagtaaatgaggatttgccctaatagtatcataatcattattactattattgatattatttaaatctgtatcatcagtacctaattctaaatctgctgcatcatcatcattatttgagacagtattatcattatgatcatcatcatccattgattgtaatacattttctatacgatttttatcataagatataaaatcttgaggaacaaataaacctgctctacctagagaactagacaccatagaagcagaagctcttctctgtgcattagtgtgagagaattgcaaggaagctgatttacgagaatccatttacctttgtgaagaaaggagattatacgataaatactaacttccaaacagattaaaaagcaactattatataatattcatgtagagaaaagaattaaatagagaagacctgaaaaaatggcagtatagagacggcgaccgtgttctctataaaaggaactgtcagcgctgcttttttaggggaaagaaaatttttttttctctcttttttaattttattactgcttggacagtttcaaggattagtataatctaatgaccaagtcaattgtcttcaatttggtctcctcgtcttaatgagaaagtgtaaagtctttgttggtaactcccatcctcaattaggtaacttagtttgtcaaaatttaggtattgaacctgctccttgcactttgaaaaaatttgctaatggtgaaacttcagttcaaattggtgtatcagttagagatgaagatgtttatattattcaatcaggttctccagatgttaatgatcatataatggaattattaattttaatttcagcttgtaaaggtggttcagctgctaaaattactgcagttatacctcaattcccttattcaaaacaatcaaaaatgaaaaagcatagaggtgcaattactgctagaatgttagctaatttattagttatggcaggtgctgatcatgttgtttcaatggatttacatgcttctcaaatgcaaggatttttttcaaaacctgttgataatttatatgctggtccaactttagctaaatggattaaagaaaatataaataattatcaaaatgctgttgttgtttctaaaaatccaggtggtactaaaagagttacagctttagctgataaattgaaaattaattttgcaatgattcatactgatagaagaagaactgctgataattttaatggtttaatgaaacataataataatagtatagttaaaaatttagatccttctccacctccaactccatcccttaatattgataataatgataacagtgataatatcgattcaactgaaattcaaactgctagaatcgttaaaggtcatgttcttgatgatattcaatcataataatgaatcattatcattatcaccaccaaaatcaaaacctttacatcactaaagaatcagaattaaatttcgaaaatgataattcagatgatgaagatgaaccctgaatttaatgctgaagaaaaattaattactttagttggtaatgttcaaaatcgtcccgcaattattgttgatgatatgattgataaacatacatcatttattgccgctgctgaacatttaagaatgaattgtggtgctaatagttgttatattgttcgcaactcatggtattttcaataatgaatgtcttgaaagattaaatgaatgtccttatatcgatggtattattgttacaaatacttatccaatatcagaagatgcaatgaaatcttgtaaaaaattaactgttataaatgtttctcaaatctttgctgaatgtattcagaagagatcattttggtgaatccattagtgttttatttgattcattagctgcaattgaataatttttttaatatcatatcatatcatatcatatcataacataacataacatattacaattttttcaattttcaattcaatctcattcataatcatatcacataatttcaatttcaatttattatatgttatttctttttatacacatacataactttttaacggcgtttctttttagttcgccactttccgtggctgaacatatttcaatgacgcagtcagagggctgcagtgcttaaattcctatattagaatttatagcattaacggagcattgaaatattaatctcttccgattacctaactttttgtttctggccaatagattatgcttcaactatttgttcggatggttattaggtgaatatttcgtaatttgtaatctgtaattgtaacttaaaaaaaaaagatatgccttactcatcaaattttattattataaaaaaccttatacaaaaactatcttatggtttactatcatccaaaggacttgaaatattaacaggtgtaaatttctttggtaatgaaactcttgaaaatctactctttaatttttgttgaactaaatccatatctaaatgtcttgttaaattaattcttctaatacatgaaatataatgtttatcatctaattcaacatctaatggatcttgtgtatgacatccaggacttaatgataatctaattgaatgtttcttatgacctgttacactaacactttcataaagttcaaaaacaatttgtgataaataatcaaattctggtaatgcattacgtgcaatcttcattggaacattactctcatataatatatttaataatgtataaatatgtgattctttagtaaaataaactcttgtacctgccttattagtttctttaatctctgttatatcctttaatatttgtttagctaatggtaatgtagttaataatccaatatccagcttttcattatcttcaataccatattcttgtggacaaataaaatcaaataaaacttttgctaatctataaagttctcttaataaattatatttagcatcatcaaatggtgattgtttaccttgttgaccttgacttttatgttttgaacaaagatgtgatgatgataaaacccaaccaattgaacctgcaggattgctattattactattttcagctgatgatgttgaagttgcatctaatgatgattcattaactttaaaatcattcatcgctaaaatattaattggatattgattcactaatgatcctgctaattcagtttcttcctcacttgtaattccttcttcattatcaccacttatcctttctaatgaaaattttctgtaaaaattctctattatgtaaagcatcatatttcattgtatcatataattcactaattttagatggatgaactttttcaacagtgacaaattcttgaaataatttatcccatctttccttaaataaaaatggatcttcatgacaacaccaaaattcttgaaatttatcaacatcttgagttttaaaattttcatccattattttatgatgataattcattaattcaacaactcttttaataacaataaaaggttctggcatttttggtggccatgcaaattgtggtggtgcctctttaccttgtcttaataagaggttttaatttctttttaacttgatccattaaatcttttgcagcatttgaatcatctaataaatcttttctaactttaaggaaatcatcaggtaattcatcttcacataaaaatgattttgaaaataacttgtgcacttgcaacaactcttctctctgatgatgtgaaaactcttacatcatctaacgcagctttatttaataattgaatatcttgacggaattgttcaccaacatctgttgcttgataacgtgcagaatgtgttggttctccaccccattttaaaattaattgaactttctcaatttcatcagtttccttattcagtgcaggttttaattgaattttagtaccagggaatgtcatctttctctctaatgcactctctaatgtttttaattttttggcatcttcaagtttcttttcaattgcaactttaatagtttgtaaaacaacatttaaatctcttacttctctaataataatttcttctttataacctttcataagtgaaatgaaaaattggtgatttaaaagaatatttaaatttttgctttggagttctatctgcgtgtctaataactgaaacaaaacctttgaaaaacccatttttgagatttttcatgaactggaattggtaaattatttttatttctaatagtaattgcttgtaagaatttagatcttaatatacttgcagttgtatcataataatctttattatctttaacaaatgaaaatccattaacatcaataacataacttttaccattagttctcaacaagtcaaaaccacagatagtttgttcaaaatatttagtaactttacgagcaatttcaacttcttcatcagataattcagttggatatctaacttctttaccttgtgtatttcttctaacaataccatcaacaacaggtgattttctagtttctgcatgacaaaaatcctgtccaacagtataagctttaacatcttcaaaattatcagtatcaataaattgttcataagatatatgaaccagtagttctaatttcatttaaatttggatcaaattcacttgatttattaccaatttttctaaataatcttctaccaccaccaccatttttctttgaataataaatattaacagttatgatcttcaccatcaacaggtttttcaacaaatggttttttaataatttgaccatcaactaataaagtatcatcatctaacatttcccatttagattcttcaacttcatcacaattaatacctaaattttctaattttttccttaattcatcatcaacttgaggtccaccatctctcgaaataactaatctataaggagttggtacaccagcagctttcaggaatttctaaacataatcttctatcccataaagctttttgcataactaaatcatttaaacaataaggtttccttaatttttcataagcaattgccttttcaagtgggaaagccatttgaaaagaaagatataaggaaatcacaagttggccaattttcaacagcctcatcaaggataactttatcaccaaagataacagtatcaaattcatcccttgcaattaatctttgtaaaatttgtctacaaggttttgataaaactttattatccattgcacaaacaccaattgtaccaattttaggtaattttggaccagtatattgttcagtaattgaagaatttgataatgatcttgattttaaagcttgaagagaatgattcagatgatgaaagatttcttgatgatgtaacttcttctttactacttgaaagtactaattggttgtttttcatcattcgatatttcaggtgatgaatttttttggtgaatttgatgccttgatagaagatgctgtaacattttcattctttgtagtagtagtggtgttgatgttagcatttggttgattatcaatactttctttgctaatatcgttcatgttattagtagaatcaattatattattattattattattattattatcaatattattattatcaatattattattattagtattattattatgagtattaatattcttatcattagcatcaataaccaaagttgtattagaacattctctttcatcagaaagacttcttctcttttcaccatcatcagcactacttaatgcagataaaggttgatgatgattaatacttaaagcacttacatttgatacagttcttgataaagcatcttgacttggagagacaatttcagattttgataatacaggtacaaagtcttctaaaattggagcaattgaagcaatagctctcttatgataatctaaagcttcacgagttaaaggatttggatctgcatcatatttttcttcctcttcaagaagtgaatcattatcgataatttcagaatcaattgacatatttgaaagatttgataaagctctctgaggaactgttctctctatattttcgtcagtggaaatagaattgatagagctaggcattataaattataataaaagaagttataataatattaaacaatgacacactcttccttatcttaaataataaaattaaaattaaaaataaaaccttctttaactttaactttaacctgcaatcaatgtcaattacagtcttctctccctaataatagaaaacgtggtattagtatagtaataaagaggacctactcttcccaatgcggtaagtgtgccgaggatggaagattttagatggaatttcctttttcggaacactacatgatttttccaattaaaatttttttttctgaatttttcacttgatgcaatttttttttgtttttctttaattcgttttatatctcacataccaactgcaatgtctgtcaccgaggttaagagacagaagggtgaaaataaggctcttgaaaaagtgcgtaaatcaaagattttctctccttttagaacaattggtcatgtctcaagtaatattccttatgcaatcggtactttaggtgcaactttctatattgtcacaattattgatagatcattccaaatctatgatgcttctactttacacttactctttgtttctagtaagcaaactccagttccaatttcttgtgtaactgcacgttctcattatgtttattgtgcttatggtgataaaattggtatttcaagaagaggtagattagaatatgaaattcaagttccaaatccgaaaaatgataaatttttcaaaattaataaattattagtatttaatgcttatcttattgcttgtactgatgatgaagtttacgtttttgaaaataaagaaccaaatgataaattcccaactgttttctatacttctttcaaaatcagtaaattatatgggaaaattgttgatatgattcatatgccaacttatcttaataaaataattagttgcaacttctaaaaatttattagttttcaatgtcaaaacaggtaaaaatgttttcacaactgaagaatttactgaatcaattacaactatttgtgcagctcctgttattaatttccttgcaattggtacctctgaaggtgtattcaaaatttataatattaaaaaggctaaaactttgaaaactgtttcagttggtgttacctctttaattacttcaatgtctttcagaactgatggttctcctcatattgtttgctcattgactaatggtgatttattcttttatgatttaaataaaaattcaagagttcatgttttatcaaatgttcataaagaagaatttggtggtgtctctaaagttcaattccttaatggtaatccaattttagttacttcaggtggtgataattcattaaaagaatttgtttttgatcctgttttatctgaaactaattcatcagttgtaaatcctccaagacatttaagatcaagaggtggtcattcagctcctccaagttcaatccttttcagtgatgaaaatgcacattttatggcatcaggttcattagatagaacattttggttattctcattacgtaaagatgcacaatctcaggaaatgtcacaaaaggaaagtaaagttaaaaatggtaaattacaaggtggtatgacaaataaattcaaacaaaaattcccgccaattatttcaattgttcaagaaaatagtagagcaaatgattgggataacattttaactgctcatcaagatgaaacattcgcaagaacttggacttcaaagaataaaaaattaggtaaacataaattaaatacaattgatgaaggtttagttaaatcaatcgcaattagtcaatgtggtaattttggtttcgttggtagtaataatggtggtattggtgtatataatttacaaagtggtatattaagaaaaaaatataaattacataaaaaatcagttacaggtattgcattagatggtatgaatagaaaaatggtttcatgtggtttagatggtattgtcggattctatgatttttcagaaagtaaatatttaggtaaattaacatttgattcaccaattacaagtttatgttatcatagatcaagtgatttatttgcaattgcattggatgatttaacaattgttatcattgatgcagtttcacaaaaaattgttagacaattatttggtcatacaaatagaattacttcaatggatttctcaaatgatggtagatggttagtttcttcctcattagattcaactataagaacttgggatttaccaacaggttcatgtattgatggtattaaattacctaaaattgcaactaatgttaaaatgtcaccaaatggtgaatatttagcaaccactcatgttaatgatgttggtatttcattatggacaaataaatcacaatttaagaaaatttcaacaaaacatatcgaaagtgaagaagaagtttgcaaatattttattaccaaatgttagtggtgaaggtggtgcaagtttaattgatggtgcatttgataatgatgaagttgatttagatgaaggtatctatatttcaccagaatctttaagtgatgaacttattacattctcaaataattctagaaataagtttaattcaattatttatctggaatcaattaaattgagaaataaaacaaaggaagctccaaagaaacaagaaaaccttaccattcttccttgaattaacaggtttgaaagttggtaatagtgcaattgaaaatgaattaggtaaagatgcagttaataaattaactgaacaacaatcgaatactaataatgaaggttccaaattgattaatttaggataaatcaaaggaataccaattcgaaacctgaatttactacattattaagattacaaaaattcaatgaatttattaaattagttgttgaaatgtctccatctaccttagattttgaaattaaatcattatcatttaccccaccatatactgaaattattaatttctttgaagctatcaaagttggattaaaatctaatggaaactttgaaattttggttgcaattatctttgttttcttacaatcacatgctgatgttgtttatggtataaagaaattagctaaagatggtgacgaagatgcacaaaatgttgttaataaaattaatgaattccaaaaagttaacttagatattgttgaaaaattagatgaactcactaaatattgttccagtgtggttaattttatcacaactacttagttttatttttataaacttttatataaattctatttatccttagaacacttgtaatgtaataatctaccatctgggtggaaacaaattatttcagaattactaaaagttctaccacatttagcacatacactattataattcaactttaccattttctcttcaagattcattttatctaatttcatattaattacattaactttaagtaattcattcttaataattaaattatgactcaatgtatttaaatttttcagattcataattaaaaatgatgacattaatcccattgatatctcatttggtaacttaattaaaatttcttcaaaatcaacaaatgttaattcggtattgtttaaaatatgtttagttatacttgtataatctttattttgtaaacatatatctaatattttaaaaatcagtcctttacataaactcaaccctttaatatctttaatacgtagagcaaattctattgaggattccacatcgtttaaatcatgaatataaataccaagtacatcatcatacttacccaacttcattaatggttgaattgataatcgtttggaattttctgaaactgggagttctttaagtttgttaagtatcatattggaattgtagttccctgaactgtaaagattttcaattttttcataattagcatcaacgtcaagaaaataataatcaaacaacctatttgttatgtctgatactgtaacatgttcatgaaatataaggtattctaaatacaaaataatgtatgtggtaaggttatgtttttccaactgttttaagatttctttatagtctaaatttgaataatcaaaataatcatttaaaaatattgatttgaaattttcttctgataatgaatcattgtttttaacaataatatattttaaattatcaaaattaaatttattggaggatcatcattttgaataagtttctgtaaaaataacactagttcattagttttattagatcttattaataaagatatagaactctgataatctttcctagtataataaaatgtagataattgatcatagagatctaatgactgacatgaattttgaactaactgaaaatcacaataattttgtattctcaaaaaaggattaatcatcttgatattaacaaataagtaacatttaaacagataagtatctattaatttcaaacattccataattgagaaattttcatcgctttgatatatggataatgatatctctaaattgttataggtaaacactgcatctttattttcttgaaatttaataattttccttctagaatctgttaaataattaatcaattctatttatttgatgtcgaatcaatggtgataaatcgggtatgtattctattctatcgaaatcaaacaatgtttgtaaattttcaggtaggttatcaataacttgatttggtgatgcaagatattctataaataaatcaaaagcttgatcaaaatcttcatttatcagtgaaatagccttttgtaatttaaattttcgtattttaataaacttcaactgttttaaatttattttatcattcttaacatcattactattattgataaattttgtaatgttgagattctctaataaaagtatagcattatcaaaatcatttaattcatctaattttgccaatatcttattatagtttaacaagtcatatgacaatactttgtccttagttaatacgaacaataaatcatctgaaaaatccagttgtattattgaatttagctttattgtttgaaacaattggaaattttgtatacttcttacttcaatgaatgaatcatatatgatgaaaataaaggggaaatgaatttgtgaatatttaaaatttgattgttctatatcaattgagagattaggtttaaatttggggtatgaaatgttgataaatttaatgtattcgacaaatatcaattgattattaaagtatgataggctagacaattgattataatttttatatgatattatctttttctttaaatttagatatttttgtagattatgatgtttaactttagatgattttaaattaatatgaatcaaatcattttcattagttgatgacatacatactaattcattattttttaaaaattgaataaatttaacttctgttatatacagattgtatctatcgatataatcagaatttgaccatttcaatatgattatttgagaatccgatacaattgccaaaaacgatattaatgaattattcttttcattagtttcatcatcattataatcagttttaacaattgtagttgccaatgacattgaatctgaatttgaatcatttgaaaccatatgtgaagtatgtaagttattccaaatatgtaattttgtagattgtatataaataacttgatcattttttttatttgaaattgataaatgtcgtatcactacacaatcatcatattgaatgactaatacattgatatatggtaataattgtatatctttaataggtttttgaatatcgtgctcaattgattcattctttgaaatttgagcattttgtggattatagttataaattgaattatgagaagcaattaaagttatatcatccgatgaagtaattgcaattggtctctctgacaactgcattgaatcattatgttgtgtaaacaattcaatcattgcagttcattgaaaagaaacaaatgaaaaagaagatggtgatataataatagtgataattgataaattatgataataaaaccgtttacgtgcgatatcgcctatataatattacgaaaagacagcttttctttattattattatttgtaccattttttaatatcagattggaatggacttagatggtaagatacagaaacggatagctgaaggagaagccaaacgattggttaacattgaattacgagagaaatatcgtagagttttaagacgtacattaaatggatttgatagtgatggaggacaaagtattgtttatgagaatgatataatgattgataaatttgagaaagaattgattaatcatgtaatggatatggataagagtagtaaagaattaaagaaaatagttaaaaagatggatgataagataaataagtttgatataagtagtatacaacaaagaactgaggtattgaatcaacagataagaattttagaagttacaatgaaatacattaaaaattagtaaagattatattattatatcatatatcatattgtattatataaatataaacataaatgtggatctggaatatggggatatgacgaaagagcatgataattagggtagcaaaaagattagcaaaagaggtatcaatgaaatgaaaattaataatattgttaaaatgatattaatgttaggggacaccaccatttttaactctttcaaacatattatcattatcccaaccaatataaatacatttaatagcttcagataaatttataccctttttaagaggtttaccataaacaattaaatttttgtaaacgtttaaataaacttcatcatttgtttgagcaattttagctaaatgtttatcatttttacgttttgttaattgatttagaggtattgttggtttaagccattcagatctatttatttcccacatttctgcaccagttggaggtggaggtggaggtgaagctagagattttatattatttgatatagatatattatcatttttatcatttttaatatctgaatgaacagtttctgaacttttaacactatttggacttgtaaaagtaccaccattagcggtataaggggtatcagttggagttgtattctttaaaatttttatatttaataaattttgtgattcctttttcaatacttgaatataatcagtttcttcatcagattcgtttgaatcaaataaatcatcaacttgatgatcaacatcattatgttgtaaaactgctgatgatatttgctttaatgaattcattgcatctttaagtctattccctatagatcgtttatgtttaattgtatttgtcattatttatttaaaaaaaaaagagcttcagtgtattatagtgtattatagtgtattatgatatattatattagctgtcgtgtgttattaaatgtattatacaaaagttcaacaacaagagtattgcctgatggttggggcttaatattacagatttattaattaagtttcaacttaaattatctttattacgtaagttgttatctctctttataaagtgtatattactaacagttatagagtattagagtttctagaccaatatattgaatcaattgaaatagatacaccatcatgagttgaattagtccaggatctactattataattattacgaaatttaccaatatatttattaagagttggtaaaatccttaatctaactatcaattcatcacttattcgttgattatcattggaatttgaattaatattaaaattaaaatttttgatagttgaaacaacgggattattattaccgaaaggatcatttgaatgtaaaatacctgaatgaaataaaattgcaattatatcactatcatcagtataaatatctgtaccccataatgatctattaagtacattttcattattatatagagaataacttggtattttaatatcaattgtataatttatatatttagaaatgaagtttggtaataatgtattggaattatgaatatatgaataagtattggtattgatatcagtatcagtatcagtatcaagatttataaaattagctgaataattatttggtgatggatgttctgtatagtttatataacctaaatgttttgaaggtagtgaaatgcattgagaatgtattttctctattaatgattgtgattgtgatgatacttctgttgtcattgtatggttggataaagaggaaagaataataccatataacaaataaaagagaataaaataccataataataccataataatgttcagcctccataaccctctccaacaaaacccacccactcacacacgtgacacaccctccctccacacacccacagtcacacaaacagccaaaacccctgcgcgcaaaagaaaaaaagcaagtgaaaaattccaaaaattccaaaaaaaatgaaaaaaaaaaaatttctgaaaaaaaaaggggaaattccaccgcaaacgaggataccaccttaaccagatttgaaaatttcaaaattaaatctttactctaatatctcaattctctctatcttttgcgatttttcacctttacttactatctctctcaatttttacttagtattgtattttcttgtattattttactgaattttattgaaatttatttaatatttcactgtattttataatttattaattatttttcatatatttcttaagttaagtttatcttccttgaaaatatacctcaataaataacaatggctaaggaattaaaggacgcagttactagagaatatactattaacttacataaaagacttcatggtgttacttttaaaaagagagcaccaaaggctgttaaagaaattaagaaatttgcaaaattacatatgggtactgaagatgttagattagatccaaaattaaatgttgaattatggaaaagaggtattcaaggtgtcccattcagattaagattaagaatttcaagaaagagaaatgaagatgaaaatgctaaatcaactatgttctcttatgttgaatccgttaatgttccaactgctaaaggtttacaaactgttgtcgttgaagatgatgaatagattattttaatttaatttttattttataaatataaataaatatagtcttttatttctaatgctacataattaaataataaacataaactttaacctatcttgtagtattagtatagtatatgacactaagtaatagctataacagtaaccgaaagaataaaacataaaaaatactcaattcttaactgagagtgaaatttacgacaattcatagtaatatcacgatctacactacattacattacatacaaaactacactacataatacataataaataaaaatactagaaatcagtgtaactatgacaaatgtacctatcattataactagcccgcgtataatcatattcaaaacgaatattaactatactatttaggaatacaagtgctaactcatatctcattcataatttggtacgattaaaaaagttatttcatcatttatctagtaagtaaattacttaatggtatacacttataccaattaatcattgtccattggaagtatgaagataatattgcaaaacacaaataggacatctcacactatttatacaaaaaaaatttaaattttcgagtattttaagggtttcttataaaagctattaaatacttataaatttgctaaattactacgattttctctaattggtacactaacacctaacccaaaacctttatcacctggtctctttaattcaaaattattatcaaaccattctaataatgaaattaaatctgaacattcatttaattcaatatgtaatttacgtttaattaaaccttccatcatacatgataaatgatgttgaattaatttaaattgtaatccataacttgttgaataatcccaaaatttttcaattgcaccccatggacatttttcatatcctgcaaataatccaggattatttaatataccacgtactgccataactccatcacaatttgtaaaattttgaattttactaacatcatcaattgtaaaacaatcaccatttgcaattattggaactcttgcaatttctttaattttttaattttatctaaattaacaggttgactactacgtgtatttttagtacgtccatgaactgttataaaatcaacacctgcatcttcaaccattttaacaaattcaatagtttcattaatatcatcatgaactctaatttttgtttcaatacaaattttatccccccatttttcctttactgcaaagaccatttgtgaaactaattctttattattcattaatgctgctccaataccttctctaacttgttccttaattggacaaccacaattaagtccaattccatcaacatatggatgaatcatttcaacacatcttaataaatcagttacattattaacaccaagttgaacgattaatgatctatcatcattatttgttgtaaaatcacctaattctagcttgtttattcctaacaaattctcttgctaaaatcattggtgaataaacaatatcaacattataatttcttaataattgcctaaatggtaatttactatatcgtaccattggacctgcaataagtactggtctattctccatttgacattttttaattatattaataggtttatcctcttctcttctaggttttaaatctctcatattgggtattatattactcatccttagtttgcttttcataaattactgataagactactgataagaaaggaaaacagtctcttttaaatggaaaactagttggaaatttcatcctttaaagaagaattttttttgacacatccattagtagcttgcaccttcccttttaggcagttgggtcctttgctgataagagattggtgtctcattggatgtgttgtcttatcttttatgtgggttttctatgtgttgtatatttatagtgtgagcttgttttaattatacatgtagtattgtaatagatgtacagaatgtactgtatagagtgtactatatagagtatactagtatatcaacgtaatagacagttgtacctatactatatcaacgctacactttcctgaattgagtctcgaaatttttcactaagcttaaaatttttttttgaaagagtaaccatgcataaatagaaattaatcctggttttatagaacaataagagtttttttactgatcaaatgacagaggaatcacttaaaagacctttagaatcaacattagattctacttcagatattaataataccaatgatgaaaataaaaaacttaaaactgatgaattaaagggtgttgcagttattaaacctgaatttatagtttcattaaataatgatgatgcaattgatgatgatttagctgaagattcaagagaaaataatgaagattctgttgcaactggtagtaataaagataaaaagaaaaatagaggtcaaaataaggcacgtaaattaattcaaattaaggaagaaatgaaaatttgtccttcaattattgatccacaatcaggtaaaatttgtattaaaggtagtgaatgtaattgggaacatgatattaaaaaatatttagatcaaaaggaaaaatgtattgaaggtcaatgtcctgtttggaatttattaggttattgtccaatgggtattaaatgtagatggttatcatcacattttaattatgatttaaatcaattaatttataaagaaaattatattcgtgatgataatagagaggaaattaatttaatttcaatggatgataaacgtttattatataagaaaaaatttgatttcccaaatagtgaagtttcaattcaaattagctgatgatgataaaatgaatagaatggatattgaaaataggaaaaaattagagaatgaatataaagaatttaaaattaaagcaagtgaaaagaaaaaattaaattataaaggtaaaaaagttttatctccattaacaactgttggtaatttaccatatagaagattaatgaaaactttaggtgcagatattacatttagtgaaatggcattatcgaaattcacttattaatggacaaaattcagaatgggcattattaaaggcacataaaagtgaatatccaggttttggtgttcaaattgctgcatctaaaacattggcaagcatcaaaatctgctgaattaatttataaatttacaaataatgtaagtgaaattaatcttaattgtggttgtccaattgatttattatttaaaagaggtgaaggtagtgcattaatgggtaattcaaatagaatgaaaaatttattaaaagttatgaatgattgtagtggtgatataccaataactgttaaaatgagaatgggtattaatgataaaaagccaattgctgatgaaattgttaaaaaattattaaattctggtgatattggtgcaattacaattcatggtagatcaagacaacaaagatatacaaaggaagcaaattgggattatattgaaaatattggtaaaattgttaatgaatataatgaaaattttgaagaattaaaggatgttagtgataaaccaaatcctgtttatttaattggtaatggtgattgttatacatttgaagattataatgaacatattaatagaactggtattgatacagttatgattgcaagaggtgcattaattaaaccatggattttcgaagaaattgaatcacaacaatatttagataaatctgcaactgaaagattagaaataattaaaaattattctaattttgcattacaacattggggtacagatgaatttggtattaatacatcaagaagatttttatgtgaatttttatcatttacttatagatatttaccaattggtatattagataaattaccaccaaaattaaatgagagaccaccaaaatggagaggtagaaatgaattagagactttattaggttcaagtgattataaagattggattaaaattagtgaaatgttccttggtaaagcaaatgaaaatttctcatttataccaaaacataaaagtaattcatatgaaaattcaagaaattaataagtaattatatacagtatatagaaaaatatcactaaaatacttaatattcatcacttaaagcttttgattttttcaataaaacttccttttcatcctttaattgttgaattttttctaataaaactgaattatcaacattattattatcttttccactattttcaactttcactttagcaattttttctttaatttctaataattcgaaaaccattgaataagttctatttaaaattaatgataaaaataatgtaaaaccacaaagatacatatttctttgagaataaaatcttcttgattgaatttcagctctacttaaaccaccaccaatatttgaataatcattattaggatttggtaaaaatccatttaattcatttgaaattttatttgttctattaattgaatcaaggaacattataccaatgaaaacgaaaacacatttcataatcatttgaaattgttgtgaatgaaatggaattgataatgtatttaataatggacgacgtaattttgatggtagtggtaatgaaattaaagcaaataaaaccatttcaactattaataatgtaaaagtgagtacatattggaatgccattgtgattgtttgtagatagttagagaagaaaagaaagaaataaagaaaagattaagtgtatataatttgagccttgaaatgatatttaaagatgacatgtccttaaaataaaaaatcatgtcagcgccttttaaggatattacgaatttatggtcttttattgaaagtattagtattattattatataaatataaaataactattgtatattgtatatagcggcgaagataagtatacatattatgcggatgtatttgtttattcaattattgtaattattatcaatttagtaaagatttgttcataaagaaaagtggtacgtatattatttaaacattttatatatcaatgagttgtatgacctctatgatattttaaaccatttaaatttttataacgtttaccacaaacttcacatctataaggtttatccttttcaaataacattccatttggataaggtgaatctgaatcaggatttataactgataatgtaccatcatcattttcacgtaatgtttgattttgatgtccatgaattctatgatattttaaaccattttggtttttataagttttatcacatccaataactggacattgaaatggtctatcctctgtttgttcaatgacatataaacttcttgcaggattatcaatataatttggattatttgaatcattaatattggtattatttgtattgttattattggtattattattattggtattattattattactaatatttatattacttgtattttcttccccttgactattatcatcaacttccatttcaaatggtgtatctaaatccatatccatatccatatctaaatcatgatgatgttgttgttgttgttgatgatgatgatgttgattatttaggtgttgagaattattattattattgttgttgttattgttattattattagatttattaaaattgaaatttgacagtgtattttggatatcaatattatgattggtattttgattattgttattgttgttattgctattgttatttattatattatgattgctattattattgttcttgttgttattattattttgatcattaaaggataaatttaaattgaaattagatagtttatcatcttttgtattaaaatcaaaaggtttattattatctaaattttgttttgtattaagatgattattaaggaaaacttcattagtttgaacagtttccattgtattcaaattaatattattcatattcatattcatatttaaattattgttcatattcatattattgttgatattcatattgttaatattcatatgatttagatttgaattatcattagttatattatcgaaatcatttaataaatttggatcattattaatatgcatttcttcataatgttttaataaatcatgtaaagttggtaataattgaccacaacaagcataatctttacaataattagcttctaaatcagctaaataagaagaatttggaattgaagaatccattataacactatcatttcttaaatccattgcattattattattaaaattcccattaaataagttaattgattgatgtcttggttgattatttgtaatggtagtattgttctgattgtgaggctgattgtcatttttagtactattattattattaatatgattattattaattaattgattttgatacatgaaaacttcatctctaagccaagaaccaacaccaacggatccccaagagataccacccataccttgagaatgagcaatactttccctccttaatttatttctatattgttgattaatatgatgtttatcaacttgttgttgttgctgttgttgatgaggattagcagttgatcttgcaaatgcaatattaataggttgaggattattacctgacatggtttataagtagtgtagtatatttaaatactagaaatgttgattaaaagaggttaaattaagaataattaacataaattaagataaattaagataaattgaaattaaaatggcaaataatagcaatataataattaaacaataaaatttataatatcgtcccttcgtcgcatcgtcgctggttgccctcccttttattttgataatacattacattacttacattacatcttaacagagccttcagttgatcttatactgattttgttcctttctttttgtatgcgtctgctctcccgtcgtcgtggtgggcagcgtgcctcagaggatattaatacacatccccaaactcaaataccgtcaactccacctccaccacaacccaatcaacaactacaatcaaatccaaattcttcatctctaaaatcaatatcttcaatacccacaatttcttcaatatcaccccttatattctctaaaaataatactaacaacaatagtagtaataactcaaatacttccgaaacttcctataatacaattattaaaattttagaacattcattatcaaaatttaataatttaaagaaaaattcaccttcaagagctaatataatacgtttacatttattaccttatttacgttatcctccatacccttttacaaatataaatatcctactttcaacttctttaattgatcttaatattgatttattacatattttctcttcaattttaatatcttggtcaattgaattacttaatatgctgatattagattataatttaatatcttcattagataaaaattgttattttgaagctttatcaagattaatttctcacaatatttggtttatttatcaattaaatttaaattattcctcacaattcacttcaatttatgaatcttatcggaaattattattgaaaactttccaattatcaattcaaagacttaattcaaaaaatatttctcaatcaatttcaatatttgttggtaaaatatttgccttctcattctatcatttaaatgatatttcaaaaggtttacttttcctattaaatactaaattaataaattttaaaaaattaataaatactaatattgatccagcaatattaaatgatttatcttcaaaatttcctcctcatttatcaaatcttatacattcaaatcaatttatacgatcggttaattattcaattgaatctcatttcataaattcaatggtaccacctcgtgaaaaaattattggaattgatgatactaaaggaatttgggttaatagatggtcatcatttgataatatatcaatattttgttcatttttaagaaattatttatcaatttcttcaatttatttgaaaaatttcccacttttgatgattaatgataattatattactaatttaccaggttattcacaattaattactcatatttatgaaattttcgattttcaaatcaaaaatcaattaattaaatattcaaatttgaaaaataataaaaatattaatataaataatttatcaaatgataattatcttttcgttatacccccaaatgtttcacaacaatcaaatattgataaattattcaatcttttatcggatgtattacaaaatccaagacatgaaagtgaaattttattatgttcaggtttaatcaaaagttatgaaaaaattttaaaattatttatattgaaaactaatatattagattctttaatgatagagacattatttgatatatttgttcaattcttaaatcatatctatattgaatcaacaaaggctaatttatttacttcacttgattggtcattttggttagatgtattaattaaattattagattcaaataatagtaatgctgaaattaaatcattaacaactatctatcaaatttgggattatatacctgatcaacatattgattcatcatttcattggatttcaaaaccaaatgaatcttcaagattaaattttgcattatatcttatcaataatgaaaattggtttaaatttttcggtcattatatgcctcttgaaagagatatgtatattaaattaattgtttggaaaattttaggtattaattcattagaaaatattattcattataataattataaatttaaacattcattagatcaatcaattattggtaaaactaattttacaaaatttaaattcaacacatagtaaaactgatggattaatatttaaaccatttgatccaattattaataaaaaatttattatttcaccaattttagataaagatgagattaaaagagataataaactgagaatttatccatatgaaatattagatgatgcaatttattcagtttcttcaattaattcagagaaaattagctctaaaacttctttgaagaaaactaaaagtaatgaaaatacaaaatcaaataacacatggattgggaaaatttttaataagaataatagcaatagcaatagtaataataatagcaataataatcttaaaaatttgaaaaataaatcagatcaatcaattgatgagaataaaagtattagtaaattcttaaatatttctaaaccaacacctattaaagattcatcattttcaataaatgattcaccaatttcatcaatttcatcatcattatcatcattagaattaatgaaaaatgattcatttaataattcaatttcacctgatgatttatctcaaccacctgaatggaatcaacaaattgaaattaataaatcattttatgaatttaaattaattaataataaacagaaaatcaattcattcttacaaagattaaatacttttaataataatattatttatttaaagaattattaattataaatgatgaaccaaaattaccaagtattgatgtcaataaattaatggaatataaatttaataaaatttcaccatcattagagagtcttgttactaaagaagaaaaggatgaaattttaaatggaaatgttactcctactggcatctctaatgattataattattttatcgatactaataatggatttgattatataaataatctaaacataacgacgggatttgatgatgaaattgattttggatataacacagggactaaaattttagatgatggtttaaatgaagatattaaagaatgtactaagaaaacacctgcatcattaaattatttatcaaatggtttattaacatataatgaagaagttaatagtttccaaaattttataactgaacaaataactgaattgaataatagtcctgaatctgatttattatcaattgatgattatactgatcattgttcagtttcatcttcttcattattggaaataccacctattaataaatcacttaaattaaacaataataaatacaatagattaaaattatcaatacctaacattataccacatattaaaggagacaggctcaatgccagttgatatttaatatcattaaagaacgctgcatatcataaggaacttatacataaacactatatagcattttaaacatatagcattaacaagtaaattagaattatactataaactcacacgtaaaaaaatactataggcgtagtactataatctttaacattcaccttatcataacatcagtttcttttcataaactatgcaaatatcattgaatatatcactacgtatattccaatcatggacatattttatactggtaatatcaagtatgatatttattttattaccaagttcaatttacttatttattcaatataaatcaacattaataccaactccaccaccgttacttaatttacaatttcaatatattgaatcaactggaccatttgcattttataatttaacaaattctgcatatgatcaaattaaaggttggaaaaaatcaaatactaatatatttactaaaattgaacaagttttaacaattaatgttaaatatttaaaattaaataaagattcaacaattggtggtgttagaatttcaatttatgataataaaaatccgccagttatgatacaagataattctaagaaaagtactgggaagaaatggccatttaaggaattatcattaattaatgatgattcttataatatttatagaattgataaaagatttagttcatggaatgaagttgtggggaaatcatattctcgtggtattccattcataagtagtcataatgatgaattaaatattaatggaaaagttaatgttttacaatattttttaccacaatggatgttaaatatatttgttccaattggagtacaggaattattttcatggaagaatgttaattggttattaggtcaacgagatagatttgaattagatagtgatgataattttaaaaatttgaaaactgttgatttattagacttcttttggtgattttaaaaatttgaaaagtaatagtttttcaactggtttattattatttgaaggtcaattactggaggaagatttccaaaatacgagtttattagttgaattagatcttgatgatatttatatattaaatgcacatgttaaatttgattatgttttaagtggtttaagatggtggctttattggtggccaggattatgttttattattggagttgggattatttggtcatttagttgtttaagttgtttatttatttcatatttaggtttacatatatggaatatacttttttggttggtctttgggtcaaagaaatgatataaatggaaatatatctatctattattatctatctatctatctatctataaatgaagtggtactttcattgtatatgttgttgtgaatggtaaacaaataacaagtaagatataatgtaaaatataaatcaatgcaagataatccatttgaatatgaggtttattatcaattggggtataaaatgctgtaatatataataatgaagtggcaggtggtaaacaaaaattaatatttgatataaaataaagaatttcttcattataaaataaaccatctttaaaaatttttgaattaaaagaacaaccaattattggcattataaataatcttgcaaaaacaactccaattggtactttccaaacattaaatgggattttgaaaatatttaatctaccaattgtaccacctaataataataaaccaaatggaacttctgcagcacctaaataacctgcaaaatccattataaaagataatggaggatcaccatcaggagctgaaggtaaatgagcttgaggtgttataataaataatgcttgaacccagggaatcattgcaacagtaattgataaaatcattgtaattgaaacaattttaagtgttgatgctaaccataaatttaatattgatttaaataatttcaaataattagttgttttaataattctaatcaatttatggaaaaaattacctgcatttttagttgattttgataaattttcttcaattggttccaataaggcatattttgaataaacacgtacaatatcttctattgtctctgattgttgaccaatttgatcattatctaataattttctaggtactgataaagttcttgataataatggttcattaattctagctgaatttgaatgttttaactcttaacatggattgagatcttgttgttaatgaatatgatgatgaatttggtagtggttgtgaagatgatggatcattatctgctgttatagttagtaaaggaggttcttgatgtaaactgtttgataattgagttgagagtgatgaatttgaagattcctgatattgatgatgtgatgctgatggtgctattgttgattcatccattatttttctctacatcaatattatcattagaattcgactgtatcataattttttcagtatggaaatccatttcaattaatttaaaagcaccaaaattaaattgaactaacatttgtaaagttaaaaaaatcataacataactaacacctttatcaatatcattaaaaattgttgaagattccattgtttgtaaataagcaattggtaaatctgaaatatttggtaataaaccacaacaaattaatccaccccaccaagtttttggacattttgcaataactccgaaagtaaagcaaagtattgaaccaacacccatcatgaaaaatgaaataataacaattgttgaaatttgatgaatatcattatttgatatattacttacaattttttgaaatgctaaacatggtataagtacattaattgcaattgaactaatatttttttcagtttcagctgttaaaatattttttttacttaaaattataccaacaccaataattaaataaattttaaaaattggtttaactgcgatataaataacttcacctaatggtacacccattgattgtataaggatatagttatgatgtatataattaattgagatgacactatatgtaaattcagtattaattgttatttttattgctctaaatataataacagttttataaagaaataaagaaataaaagtaaaaaaaatactataaaatctgtcaggtgggtttgtatatagccgtttcatctagaaagttttatcccacgatatatctattattatatataatataataatcaatcaatgttggcaaatgtatcgtctttaagatcagcatgatatgggaaacggtatggtaaattatcaggatgacattcagggtaatgttttttaatagtttcaagtaatgcatcaaacattaatttataacctttaccagagaaatgaattccatcacataaaagatcactacaagatctttcatttggtttttcattaatccaatccatcattaaatcatataatcccaagacaggtacatcagttataatttccttaagagtatcttgatacaatttatttctttcattagttctataatcaccagtaattaaatcatcaggatgagatttatcccaatctttagcaacatgaacaccgggagctataacaatcaatgggatatttcttgaagtaaattctttaacagcttccttcatttgaggaataaatctttccaatggcattgattcattatttaatggagaattaccaattaaacgagcatcatttgtaccaaagaacatataagcaattttaatttttttagaatctggtaaattatcatgttcagttttcaaaattgattttgccaatggaacagcatctcttgaattataacctgaaaatccacgttgaataatttgtaatttacgttgataaatattttgtaaagcaggaccaagtgtgaattgaacaggagcatcaatatcagtggataaacagtattgatcaaaggcatattcagtaattgaatccccaaacatgaggaaagtgttataatcagtgtaacccattgtctatatagaaagaaggtatatattctactctactatactatactatactatactatactatactatatatacttactctttaatgattaatattgatattgttgagttaataaataaattaaataagaaaaacagacattacgtaatcaaataatgattaattctgctgaaaggtaaccaattcaggtacttgttagaagaggttgtgggtgttttagcagtgtagtgggttttagttgaagagtatactatatagatgtgtttgtaaagagatttatgatatgacagtatagtttataaatggaaacagtgatcaatagacaaagatataagagaaagtgataatctccaacagttctgctcaaaatactccctattaccgtagaagttataataacattattataatggaaataataataaaatatccacttactaacaaaatgacataatttactatgtaatactcatataaagcgcatttcatatggagattatcaaatgctcagcgtttttctaattttttgattttgattgtataggggttggttggttggttggttggttgtaatgatgtattttcttattcttattcttattgctttttagctaactattacccaattgaactggtatgagtgtagaacctgctcgtcgtagtgtggcaatgcaatttgttgattcaaattcttcaaatttaagttcttcaagctcaaaggaggtaccttggattgcaactgatcaattatggcatggtgaagtaattcattcatttttaccactagatgataataataatttaattaataataataataataaattatcacaaaaaattattaaaaatttgaaaaatatttatgttggtgaacaagtttatatttttgaaactttgaaaactgaaattgataatgttcctttcatatgggcaaggggttatactattatgcaacctttaccagctgattatatatctgcttcaattgatgttaaaaaattacctgatccaaatatttcaatttcaatcttccccttaaattgtgttaaaataatttcaaaatcaactattaatcaaagtcaaagtcaaaataataacaatagtaacaatacttttattgattataatagttcaacattttatgatgagttggatgattattcaatcatgaatgattcagaattaatgacatcttcaaattcaaattcaaattcaattaataaaattaaaaaaccttttaagcctcaattacctttaactgattccactttcaatgaaaatttagaagaagaaattaaactcacattaaagacaatttcttcaactttatttgcagtttatgcaaaaaataattttgaattctttgaaaaattatcaaaaatttattatgaattagatgatattcgtacaagtttacattatgatattttaactaaatatgaaaaaacaattgctaaaaagaaagttatctttttaatgagtaaattctcaaaattattatcttctggtggtggtatgattaataaagctcatcattcaaaatcagatattgatggtaaagcttcaattatggctcgtaatgaaaaaactgctgaattatttaatttcccttcaaataatgaatctaaattaattgatcccgctgaaattgctcaaagtcaaattatttcagctttatctccaaattatttatcttcattaaatacttcatttattccatcaaaaaattcacaatttgctgaaacaattccttcaaatattatggtagattttaaagaagttttaggttcttcaaatgttttaccaaaaggttatgctggtatgaaagcttatatgtatttacgtaatactaaaaaaagattaactgaagctttctgtattaatattgaagcaaatcaagaaattcaattagataatttagctgctgcattatttactaatatacctgcaattgaagttgaatcttcaagaatttatttagttgcattattaactgaaactattcacatttctgataatgaaaattcaaaattacctgttattcgtaaaggtatttgtgcaggtgtggcagatatttcacgtattttctcaaataggaaaggtcatttagtttctggtcaatctcatagatttgttattaaattattttcatcatttttagatagtcaaaagcaagaagttaaattatttgcaggtatgaatcaaatgatggcaaaatctttaactatggttaataatggttggggtgaattagttgatagaattattagtggttcaagtaagggtgtggcagttaatccaagaactgaaagattaattttaagtattaaagaattaaaattaactaatgagaataaaaaaatcttaaatcatatctcaggtaataatggtgattttaataatgttgcttgggcatgtattccaactttaaattttaatccattagaaattgatgaaaatagaatttatttgaagttaaacaaaattattaataaaaatttaaaattaaatgaaaaaagttttttaacagttcatgttagatcatcaaataattcattaaaatttgcaaagggtagaaatgaaaaattattagattcatggattttcttatctgtttctccaaatgaatcaattcaagaattaatagttattagaggtttaagtgatcgacctgataatggcaaagattatcttatctttgatttatttttagatgaaactttcatttgtacaacaaaatatttattaagatcatcaaatgaagtttatgattgtggtattaattctaaaacaccaattaatgttgaattaaaaacaaatgattcaattattgttgcaaatatggaaatagatcttgaagttgttggtaaggcttataatagagattctatcggttcaaatattttgaactggtctaatatttatggttctaatttaactgtaaatgaagactcatttattgatatgttaactaaattgaaaagaattcaattaagtacattagttagattttttccaaatttttgttatgaaataatttgtgcatatgatgcatcatcaaaattaggtttgaatagattgaaaaaatcattatttgatgcattagttcatttatttgatgcaacaattattagaaatcaagaatatgtggttttatttgataatatgattaaagattgtaatcaatattacccaaaggttggtgaattattattggaatcaatgacattagttttcagttcatttaataaagaatggaatgcaaatggtagagctttatgtagaacttcatacttagttctgaaaatttgttcattatgtattaaggataataataattttaaaaatcaaactgttttatttacaaaggcaattacaaatttccttggtgccaatattgaaaatgttttagctgatcaattattaattattcaaactttagaactttacttagatattatgaaacctttctttaatagtgctgaattaatcaaattctcaaatgattggattcatagtaacaaattgaaaggtttaggttcattagaagattcaaattctactgcattagttaataaaaagaaaaatagagagcataagtttatcattggtaaattattttttattaatagattattaaatagtactgtcttcactgatggtaataatagtgatattgaaacattattattcactgcattagaaatgatattgaatattttttcaagtgatgtcattgatttagattgttcaagattggcattgggtatatatttatctgttattaacctaacttttggtgctaaaaaagtttacactgatgaaagtaagaaattatacattttattgatcaaactattaccatttttatcaacaactttcaataaatattattcatattgttcaaataatggttattttaaaaagaagagaacatttacacaagtattccctaatgaatatccatttacggaacaaactatggattcaattgtaactgatgttacattagttgaaattattgttgatttttcaattattattgtttcaacttcaaagattttcgaaatttatgaaaatgatttctatcaaaatgttaataatagtaatacaggtatttatgaaaatttaattaataaatttgatattcaaccatttaatagaaatacttgtattacatcaattttacaaactgttaaatatttagttgatggtaaattttatcctcatgattcatggttatcattacattcaatcaatttacaaggatgttatttaattttaagattagttgaaccatttattccaagagcggataataatactattccaatgtggaatttatatttaacattactttgtaaaacagcaagtgcaaaacctgtttcaattgaacatttagaatttactccaaagaaaggatgtcttcaattaacaacagatttaagaagtaaattatccaatattattaataattcatgggattcattaagtaaggaagcaagtgatgaggatcaagctagatttcaattaaagaattttggtggatatcaaaattcagttatgagtatgaataatcataaattattaaaatggattatgttattttcaatgcaaagaaatgaatcatgtttaaatattggtgttaaaattttttggacattaattgctaatgaattagttgaaaaagattcattatttgaatttgagagagaaacggtttcatcattatatgaattatttgaaaatgaattaacttattcaccacagagtaatgaaatttctacttatttagcatcaattcaaaatattattaaaaagatggatgttgaagatatttcatatagtgaagttaacagattagttaaaacactatcaaaatacttaagttcattagttgaattaagacaagttccaaacggtgaagaatttgatgatgatcgtacattccataaattgaatatttcaagttatttaatgaatgttgatagaccagaattatttcaaggttttatttgtgatatgtatgaaaattatttagataagaaaaattatgttcaagcagcattaagtttagaattattggcaaatagttgggaatgggatattaatacttatttacctgaatgttcaaaacctaaattaccaagtcaaacagcattcaaaagaaaagttgatttatttaagattatcgcaaataatttcataaaaggtaataaactagaacaagcagttgatatttataatgaaatgttagaagcatattctaaatataattttgaattaatgggattatcattttgtcatttagaattaggtaaattatatggagaattagagaatgttgatagattagagagtacatttttcaagatttcatttattgggcttggattccctgaatctattagaggtaaagaatttatttatgaaggtttaccatatgaacatattacaagtgttcataatagattaaatagattatatccaggttcaagaattattagtaatgaagatgaagcaaataaattgaaaagtgaagaaaatagtccaattggtaaataccttttcattaagacagttattccaaagaaggaaagttttggtagtgagaaattatcacatatggcaaaacaatatgttgataataagaatttaaatacatttattaatacaagaagattacctggtgctaatagtattactaatttatggacagaagaaattacttatacaacttatatgacattcccaacattaatgaatagaagtgagattaaaaataccaatattatcaagattccaccaattaaaaatgcaattagatcattaattattaagaatgaagagttaagtaatttagaatatttaattaaacaaaatttgaaagataatattaaattagaatcaattgcatcaagttcaatgtttaatagtgttagtagaattttagcaggtacagttgattcaccagttaatggtggagctggacaatttaagattttctttaactataaagaagagggtaataatattgatttaggtgaaagtattgaagaatatgagaatgattgtttgaaattaaattcatgtttccaagatttaattaagattatgaataatttacttaaattacatggattaattataccagatacgttaagattacaacatgaatcattagttgaattgtttaataagaatttccaaagtgatattgaagaacttgaattagatgttttcagtgaattagattatgatgaattaatgaaatcattaactaataaaaacgtttattcaaatagacatcgtggtagtggtaataataatagtatttccaatatttcttctagtatgatcaatgttggtaaacaatctagacctatagtcaattcatagtcatcatggatcaattaattcacaacatggttcagcacatggttcacgtcatggtagtagatatggtaccaatgtcattaagaacggggactggacaatcaagtcatcatcgtcaatcacttagagatgatgaatagcgacgacgcaactgagcagacaaatctcttcactgagtaaatccaaaagaaacattcttaattataaataagtaattaaaatagaaatagaaatagacaatgtatatgattacgtaataaaacaataataatatatatataaatatcaatttaatcagacctcactttaatcttatatgatttctcttcctgttgaggagcctctttctttatccaaatggataactataaaagacaccaaacatttgctaacaacaacaacgttctctcagaggacactatccgcttacaaatgctgggtatgcgtattcgtcaatcagttagtaatggataccaactcccacaatctgcaacagataataataataataatgatatgaataattcatttaaagctccaatgagagtcccattaccaaatcatatggatgcaccacctccacttgattataatggatctacatgttcatcacttgcaggttgggagaatgaaattgagacaaataatttacctaggggattaaagagaaattttgaagaaaataataataataatgaaaatgatatgaaggaaagacaagtttcagattttgtacaacgttacggtccacttgtctttgatgaagagttttaattatctacttataaaccatacttatataacccttatttaaagcaattaataataatacgataccactataaagcacttaactaatagcatagagcgaatttcgttttattgttgatctgtaacgtagtagtagcaaccaggaagaggaaggaagccttctcttcgattgcttgaattatcattattgtatactctggcttacatcctttccatcatctgcaatacttcatagataatgtcctccggtgttctgcgcccggttaagatcaagattggcttatgtggtgaaagatcccctaattaatttatcttcatttgactggtcgccctattggacaaccccttgctcaatggatgatattcattcagtatttcaaccacctgatataagatatttaagagatcatcatcctcaaactttggcttcattaatatcatcaatttcaactcatctcgtttatttatcaaaactttcaaatgtaccaattcataaattcccaaaaattcatttacttaattgtatacgtttattgacattgtttatgcctttcctatatgaaaaatcatcatctgccttattagaggataagattttttggtcagctaaatatcattctaaacatcatacaagtgggaatcttcatgaacaaatttctccaacagaatctaatattccaactcctggtgttgatgatgaaagtcataatggtcaaagtcccaatgatgaaacttcatcattaaaagtagattatcatactatgatttattctgactctccattgggtatggaactcatcaactcatgtttagatcttttatttactctagactttacagttcaatcaaataaagtatctgcatcatttgctaatgattatcaaccaatagtatgggaaccaggatgtgaaaatttatctcattatatggatccagtacttgatctagattcaaatagattggaaataatacgtttactattatcattattttctaaaaatttgtatacaactcatagtgatttagtcggtactggttcaagatttttaacagttttcgttgctgtaacaaacggaaggaaatattacacattatgtctatcgcttattaatacaattttacgttcaactcaaaataactctaatcctacaatttctccatatgttaattcaaatataaataataataatggattagaagttcaaaataatgatgttcataaaaaaattagaattttactcgtaactagtattatacaactattctcaatcattgtcgtttatcctatacctttcaaagatattaactttctttacaaatataatatcgttctcagtcataataatcaaccgaaaaatagaactagaatgtttttaaataaactgaacaagattgatgatttaaaatttattattactacattatcaattccaatactaaacccaataaatgacttgaataatttgagtgcattttcatacataatgaaatcttcaaaattaattgatgatgatgaaatccatatatggtcaaaggaattactgataattttattggaattttttcaatgtaactcaaaatacagatcggttttcacagaattattaggacccgaattttttgtgtctttgatgtattttgttttgaaatataaagatgacgatagtcaaaagaattttgttaaattatgtattcaaaatttattatacttatcatcagatttaagaatgtgttcaaagttattgtctcactttaatatacaattgtatgaatctttaccacaactattaagaacttcaacaactccaacttcatatagagattttcttttgattcatctttgtaacatactaagttcttttaataatttgaatgagttttcaaataacaaatcaactgattctttctcaagtaataacaataataataataataataataataatagtatatcaaatgagtctactttaatatcaccactgattcaatttttatacaatctcctaacgatgcatattgccttatttgaatataataaacgagaaaatagagatattttaagtaataggagattatcaattaaagatttatctaaatgtcctccaagtcaattatcatatgcagcttcaagctcgttaattcatgtaataacaaaattctctaatcaaagttatctatctcagaacactaaagtcaattgtgagcatatttcattaatattagccggttgttgtcaagctgtttgtagggatccatcggactcagttgttttattatacatattatctaaaaatgcaagtttattaaataagttggctatgacaatcaagaatttatctgatggcttatttaatacattgattcaaaatgagaagaaacaatttgaaatacgtcaacatcaattaaagcaacaacaattcttacagccggaatcaagatccatgtctcaaaacgatgatcctctgaatgattatgataacgataatgataatgaagtagctaatatgccaacactaagtagacaaactacattagagagtattccatctatacgaagtatgccagctttaactaaacaaacgtcacaaatttcaatttctcatgagtctccgaaattagcaccaatcaatcactttaaatttgatgaaggagttgaccctcaaaaaactgaaagtgaagaaaatattgatatcaagggtgaatacaatattttaatccctgatgatggattcaatacacctttgcctattggtatgagtgataggaaagctggtaaaaatccatattatggtaaattcgaggatacttggagtggtaaagaggcattacatgttttaagagaatgtattaaactgacaaatactgagttactcgatcatgaaaagtcaaataatagaaatgggtatatcagtaacaatagtaaattatcagattctttatatgttattcaaacattactgaaattaaatattggttccataattaatgatatttcaaaatcagatttatacaatccagatagattagctttcaatttactgaaattcaaatggaattttagctctctggcttggtatatttcattaatctggtcggatatcttcctcaattataatgtttatgaatctaaagggttattagccgaattaagttccggaatttcagcaataaaaaaaactagttcatcatggggatttggtggttggaaaatcggtagtaataacgatgaaaataataattctccggagccaaattttaataaaaatgaagaaagtgattattacgaaagtaatgttatgaattatagtatttggtttggaactcatataatattatttaggatcaatccaacatcggtacgaaaccattattcactacaacatggaaaatctgagatactgaatataataacagataataataatagtaatagttcaccatttgcagaagttttggtgaaaagaaattctgtgggatcaccacttttgaatatgcgtggtaatggtagtggtgtattcactgaaggtttttggaaaagacaaggtgttagaccaaattctcttgaacgtcgtgatagtgatgtttcattgaaaatgttattacgaggtaatggaggttccaaccgtccaagtattagtcaataatgtaactatttaatagttttgtatatttgaaaattttgtaattatttaaatttagtgaaaacgtttttgaatttacaatcctagttattctctgaaatacgacaattttaccttttaggtggtattcaaatttataaattgaaaatataacatgttaaacaaaaaggtagtgacttagttgttttgaaagcataataaaagagattaaattgttttattcatcatgcttataggtgaagaaatgatgaactggatgatatttactcaagaggaataatattcaataaatatttatgacattaaaaatgttgtacacatttttaacagatttaggaggctcgttaaaataataaatgtttatcattgatggtttactttacagtttattatatgattatacgatattaaaaaatacagaagtgtttatatgtgaagtgttttgatgtaatatatattaagagagagagaaaagaatgcatcaacgtcttccttttttattagtgacaacagtgaaaccatcatcatctaccaatggaggaacataagttttttctgaggtatccatcatatcaacatcttgatccattgcattatcattatcttgaccatcatcttcttcatctgatgaaatatcaggatttaatggatcatcaataacattaacttcaattttaccctttttattattttgcttttcaagccattttgcatatgcttgctttattaaatcaaattgattttcttgacattgtttataacaattaattatatttgttgcaatattaattgttgaaccatcttcaattattgaatcaaattcatcttccattataccctgataataattcatgaatataaataatatcaatttctttattattaataaattcatcaataactgcacctgccatccaatcacgtttctcagatgattgaggtccaccccatgaattatcaacagcctgttgataatgtatgccaattatgtaaaatcattgaaactccaagttcaaaatttgcatcttgtctatcacttggaaactggtaaaagagggaattcagaggatataggttcctggatcattaagaaatatttcagacatggtattacttgactaaactattgtacttacagaagattaaaatatgcattaataaacatgaaaagttgataaaataaatttttcatcaagaaaaaaaatttaagtccgaaaatagcataactaaataatacatcccggagttaagaaaaatttctaaattgctaacaatagaatgctcatatagtcttattagctaagtatatcacctggtgacatcggaagattaacatttagatgtattgtgactatatctggtttctttttctgttttcttttatctaggctactaatatcaaagaggagaatggcagaaccatcagcaaaggaaaagcttacagctcatgagaatacaataaagattgaaaatgctctacgtaaaatgaatcaaagtggaatgcatgctaaacgtgatccaaccatttatatcgatgataatggtaaagaattttctacaattgatagaattgttacaacagttgatgcaccaacaagtattatacctgaagattctgttttatttgcaaataagggtggattacctgattataaatttttacgtgaacattttaagagagaaggtaaattaaaggaatcacaagttttaaaaattattaaaatggcaacaaaaattttcgaaaatgaaccaaatatgttacatattccatcaccagttactatttgtggtgatattcacggtcaattatatgatttatgtaaattatttgaaatttgtggagatcctgataagacatcatttttattcttaggtgattatgttgatagaggttcatattcactagaagttttaatattgttgtatagtatgaaaattaatcatccaaaaacttttacaatgttaagaggtaatcatgaaagtaaacaaatgacacaacattttacatttaagggagagtgtttaattaaatattcaattgaagtttatcatcaatcattaaaatcattttgtgcattaccaatttgtgcaattatgaataaacaatttttttgtgttcatggtggtatatcaaaagatatcaaatatttaagtgaaattaatgatattaatagatttcaagttgatttcccatctcatggaccatattgtgatttagtttggtcagatccttcagatacttttgatgatgaaatttatggttcaacaaaagttaagaaatttcaaagaaaattatgaaagaggttgttcttacatgtattcatataatgcagtttgtcaatttttagagagaaataatttattatgtgttatacgtgcacatcaagctcaagataaaggttatagaatgtataaaaatactacccaacaaaaatttccagctgttataacgttatttagtgcaccaaattattgtggtacttatggtaataaagcagcagttttaaaatatgatgttacaacaatgaatattagacaatttagttcacaacctgaaccttatcatttaccaaattttatgaatgttttcaattggtctgcaccattcgttgctgaaagagttgttgaaattttatttagtgttttaaatgtttgtaccgatgaagagttagataatgatactccattatcaaaggaattaacaaaatctttaatgaaaattcaaaatgaacaaattaataaaaagaatgcagtggaaaagaaagagattgaaattgaaaaaattgaagttgttgaaaataaagaaaatggaattgaaactgataaagataaaatggaagaggataaaccaattgatgaggaagaacagaaaacattggatcaaatggcactacgtaataagatattggcaattggtagattatcacgtatgttacaaatgttaagacaagaatctgctaaagttgaacaattacgtgcatatagtggaggtttaacattacctaagggagttttacttgatggtaatgatgaattagataaacaattatcacattttgaaagggttagacgtgcagatatgacaaatgaaggtttaccgccaactgttgaagagaaagataaagaagatcatgcaagatataagaaattatgggctagagtaagtaaagggctgtgaaatacaactagtattatgcgataataagaaattttatgaaatttcaatgtatattcttcagtcataataacttttgtttcttttatgtatatttataaacttagattgatgttattattattatattgtaattaaaatagcaatgagagaaattgatattagtattaagatatccaatgcaataaagaaaatcgagaaatcatttgagattgaaactgataagggtaaagttatccgaaataatcgaaattcttatatgtatacgaactaaggatggtaaacaatgtagtacaattgatcgagttgttcctgaagttgaaaaaccggaaactaagatacccatatgtagtgaaattttcaataaagatggtatacctgattataaatttttaatgaatcatttccgtaaacagggtagaatttcagaaagacatgttttaaatatattagataaagctgaagaattaatgagtgaagaagataatttaatacttattgaagcaaatgaagagataccagttgcaattgttggagatattcatggacaatattatgatttattagaaattattaaagtttgtggagagattaaaaaagattgtaaatatttatttttaggagattatgttgatagaggagattggtcattagaggtattattattagtttatgcaatgaaactttcatttcccaatgaagttaccttattaaggggtaatcatgaaagtagacgtatgagtgaatattttacatttaggagagaatgtgagagaaggtatagtaaacaagtttggataagtgcagtttcatcatttagatcattaccgttaggtgcaattgttaatggggattttctctgtgttcatgcaggtatttcaagtaaattggataaactttccgatatagttgagataaatagatttaaagttgatgtaccgagtaaggggttaatgtgtgatttagtatggtcaggatcctattgataattatgatgatgaagaagatagtggaagaagatgatgaagaactatttacatttaatagtgcacgtcgatgtagtgaattatacagtttcaaggcagttgaaaagtttcttaaaagaaatgatttacttgcaattgtaagaggacatcaaccacaaatggatggatatagattacatcgtacaggagatagtggattcccaacagttattacgattttcagtgcagcctaattattgtggtacatatggtaatttaggagcagcaattatttatgatggaggacaattagatgttaaacaaatcaaatcacaagatggaccatattgtttaagagatcaaatggatgttttcagttggtcattaccatttgtagctgaaaaagttagtgaattagttgcatcagttttaaatgtatgtattgaggatgaagttattgataataaaagttatggatgggagatagcggcagaacaatggagaaaaatcagatcagaaagagaggcggaaataaaggaagtgaataataataatgatgatgatgatatgaatcaccaagagaagaatttgagagtgtaagagcagcagatattgataacgaaggtcttcccagtgaaatagtttagtataaggtaccttaaagctaaaaatagaatagaaaataggcactaattaataagaaaacgcgctaatttgaaaaaaaaccgtttttttggcactaaattttttttactggttttagccccgtttcactttatctttatcttcattttcattttcatcaaggtgatatataaggaagaagtatctttatcttcatttatttctttccactcttttcactctacaatgtcgaatcctttcacttttgatgattcagataatgaatcctctacttaatgatttccgtttacaagtaccttcatcgtctgcacgtctctcagtttcaccaaatagacatttacgacgcgctagtaatattgacataaatgatcatgatccaagggatgatgatgatacgaataataccattaatcattataaccatactcccaataattcacatttaactgttgatccatttctcaacctgcttttgataatagtgatgataatatagtggaaaatcctaatgattatgaacatgaacatgaacatgaacatgaaccacaacattataatgaacataatcagacaatggaatatagtagtaatgatttccttgatgataatgaatcagtttatacaaaatctaatccgattgttaatgtatatgaaaattataatgattcaaattattcatctaatttcttaacaactcctaataaaccattatattctcatcaatcatcaaatcaatataattataatgataataatacttctccaactccttcaaattatgaattatcaaattattatgaaaataacaacaacaataataatcataatattaataatcctgttatgaataacacaaataactttggttattatgatgaaggtgattgttatcaaagatttgaacgtgattttgatgaacctgaattaaatcaaaatgaattatttcaagatgatgattttcaaaatgaaaataataatatcttaaacgataatgctaattttgctgataaaggtgataataaagtagaattaattgacggtaaatattatagttttgattatcctgtacctgatcaattattaaataaaataccttttaatggtgcaaaacaattaacagaatttactcatttacgttatcatgcaattacttcagatccaaaagattataatgaacaaaatccaataattagagattatattgaaaattatcctttacgtccaaatatttatccaattaagagagaaactgaattaatgattgtttgtacaatgtataatgaagatgaaattttattgggtagaactttaaaaggtgttttcaaaaatattaaaaatatgtataatttaaatgaaaataataatcatccatttggtaaacaaagttggcaaaaaattgttgttgttattgttagtgatggtaaaagtaaaattaatgaaagatcaaaagctttacttacattattaggtgttttccaagaaggtataatgcaagattatgttaatgatgataaagttaatgcacatttatttgaatatacaactacttttggtattggtaagtttgattataatagatcagataatagttataaagttccattagttacagaacaaacagttccaattcaattaatgtttttattaaaggaggaaaataaacaaaaaattaattctcatagatgggcattaaattttctttcaccaaatttaaatccaaaagttattgttttattagatgtcggtacagaacctggacctgattcaatttataaattatggaaagcttttaaaaatcctaaagttggtggtgcttgtggtgaaattagagcaatgttaggtaatcatgcaagtgttaatgatgaaagttcaatttggaagaagtttttcagattaatatattttaaaatatcagattttggtaaatgtattataaatccattaattgcagcacaaaattttgaatataaaatgtcaaatattttagataaaccaatggaatcagcatttggatttgtaacagttttaccaggtgcatttagtgcatatagatatgaagcattaaagggtcaaccattaaatgcttatttccatggagaagatatgaaactaaatgttaataaacctgcaggtattttagagagtaatatgtatttagcagaggatagaattttatgttttgaattagttacaaaatcagaaaaatcatatttattaaaatatattcataattcatttgcaattactgatgtaccatcacaaattaatgaatttattaatcaacgtagaagatggttaaatggttcattttttgctgcattatattcaattttacatttttatagattattaatttcaaaacattcaattggtagaaaaattttccttattattgaaataatttatcaaacaattaatatattactttcatggttttcaatttcaatttattttttagttttcagaattttaacattaaatgttaaagatgtaccatttattggtgaaagaattgctaatatattatcaattgttttcctttggatttatattggatcaattgtacttacatttattatttcatttggtaataaacctaatgatgcaaaatatttatatttacttgcattttcattatttgcaacaattgttatttatatgacattctgtgttgttgcacttacaattgaatcaattaaattaattaaagctgatattggagaatatactacatttacaatttcagttggattaaaatatttaaggaatgcaaaatttagggatttaacagtttcaatttgttcaacatatgttttatatttaatttcatcaattatatttttcgatgttttccacatatttgcatgtattattcaatatttattattatcacctgcatatattaatgttttaggtatatttgcattttgtaatataaatgatatttcatggggtactaaaggttcattatcagttgatcataaagttccaccaaagaaagctgaagctaagaaagatcaagatgatgcagttaaaagtgaagatgatgaaactgttaatgaaaaagttttattattaagtgaaaaacttgaaaatccagagaattattttgttcaagcacaaacattattaagtaagggagaagttgcaaaggagaagagtgaacttgatataattaaggagaatatagcctaaatcagagaggaattatgcaatgggtagaacatatacagttattatttggttaatttgtaattttattttattagttgttattttacgtacaggtggattagaggattattccaattatgttaatggagagactacaacattaagaaaaagaaattattggaatgatatgaatgttgccaattattttatgacaacaattttatggttagttgcagcattagcattatttagattaattggatgtatctattatagaattgacttctggatatcagagagaaggtttcataagagaagtgttgtttaataataataagtaataagaccgcggtttggtttcggagtttagatagcggtattttttcattagtatcattattattatcttggcaatcgatgatctgtttataattttattattttatttttataattttataatttataatttgtgtactatatagaggtatttggaatagaattgaagggataaagaagtaaagaaaaggcacagaactgaagtaaaaaagaacaaagaatgaagaataatggaataatggaataaaggaatagaataaggaaaaaagaacaaagaataaagaatagagaataaagaataaagaagggaataaggccagtcattaaaatcatatatcattaacatcattaaaattcatcattattgtgtagtaatatcatagctttttatatgagatagtcttcagttaataataagttattattatttattggactatggaaagcattagtaaataacattgtagatgaatcacttgtaattgaacttggcgataatgttcggtgataaataaagtggtgaattaagtgattcattataatttgaaattggtgaataatttggtgtaattatactattattatgttgataattaaaattttgattcatattatgattatgaatttatagttattcatattattcatattattttgtaaatgaattgaattaaatcccattgatgaaatatcattatctttgtcattttcagagtgggattttttaatatttctactatcattgggtataaatttgtttaaatttaaatttaaacttgaatttggatttgaatttaaaggtgatgtagattcaggtgatgataacattattggtataccttcacttggtaaaactggtggtaataataaagtatttgaattatttgaaaaatttaaatctttattcaaatataaatcatcatttaataagaatttaattgcattattaattgaaaatggtggttgatctgtaattgtaaggatcattaacatcatcattatcattatttgttcatcattatattattatcattagagtctataatatttgaggtattttcattccaattcaggctatcaataaaattatttaagatttctttatcatcagatttaactaatttacataaattaattaatgatttattaagtaaagttaaacgtttatctaataaatcaacataatcacttgaatataatctatctttaaattttttcttttgagtataaacacaaattttattatcaattgaacaacgttgacaaggtgatttaccattacatttagtctttttcaaacgacatgaatcacaggccttgccgactctcttctttttacaatctggtggaagcatttacttttaaatgatattttattatttattattattaattattattaagaataatattaatctacaatattatcaaaaacagataaaagggatattattcctattatatatagccctatgaaaggtatataatagagcaatgaagaatataaaagacaatacaatacaatacaatacaatataagacgatattaagaataggtttaagtttaagttaattctatatccgaaccgacggagttaaaatacagaaagagttaattaaatatactattaatacttgattaaagtaagtacagcagaaaaagacacttcccagtgactaacacaacccaatggatgatattaccgagtagtaatagagcgggatatattgtaagtgtaatatctaacataacaatgaggtatttaactggtaattaagagtggctatagtactattatattgtattgtattatattaaatatcctacactgtgtgaagttttgtatctgagcgtccacctttgtaaggtgctgcccaattgtatttgaacggtgtctctaacggtggtagatcactgagataatcgtcacttgaatctggaaattcaagtaaatttacccccattttattgtatatttcaagtatttcaactaatggactattttgttgattctcatattccattatcaattccttcatggtaatggaatcatcttttaaattctttatagcattatcaatatattgatgaaactttattataactttatccttatcttcattaactaattgttcataccctcttttgtatctttcttcataattagttctttcttcatttttgtcttcatttttgtcttcaattctattatctacatcattttgtgaccattctccccacggaagattatcaataaaacataaaattcttttatctttatcattaactaatggtctactaaacattttaccatctttaaattcaattgcaaatctaacaagtggtgtctcatttaaattatctaatcgtgatgtcattaaataatcattaatttcattcttatccttgtctccacaatatccaaatattggtaaatcaattactttaatattaccttctcctttaggaataaatccatatgtactaataaaattatgtaaatcctctaattcatcataactaataaatatttgatctcctttcttaaatttaaaatctttattaccaattaataaaatatcaccagttttaatatcaacatcaaatttggcattataattacaatcatgattaacataatctaatataggtacaagtgtaatatcaacataaaacccactttcttcttcttcatcactttgttcttgttcctcatcatcaactcttggaatctctaaaacacgtgaacgtactgctgcaactatttgaactacattaacttcaacattcatgttctcattaatacattcactaactctttcccatctttctctctctaataaactaatctctaattttaaattacctgaaaattcttctctaaaatcattaattgcatcctcattttcaatattaaatccattaactttacaattcattaaaacatcaaaataagtataaaaatcctctaatttttcattcttaaatcctttcttttgtaaaacattcattgcaattaattgaacaattaatatttcactctctccataattaataaatttcattgataatcttaaacattctttgaaaactgtcttttcttcatcacttaatttctcaataatttccttaaatgtaactaaactcagggtacatttcaatggtattctcattaattcaattccattatcatcatcatcatcaccctctttaacatcaatatcttcattacaatatacacccattccatattctttattatttttcactgatattttatcattaacaataatccccatattttctctccatttctctaatttttcaaatccttctacacttttatcaaacattgtctattactgtcttatatgagatatatactattactatatactactatgatactaagatatttgaagttatactttcgaatcgttgtgtgttgatcttaacataaacttctaaaagttcaacataaacttctttttcttcattacgtaacatcttcatcttatcactatttaaaacccaaataacacttttaccattagattgatatttaatacttctatctgaatatgtctttattaaatctccaaataatgtaagtggtaattcactactctgtattgtaaattctaaattattaaacttaatttcaaatccaattataccactttcaatgaaaaataatttaggttgattgatatttttttcataaattatttcattatcttcatattcaaccctttctaaatatttacttaatttactccagaaattaccttcagttttagtacttatacctctcattacttgtaatataagatgtgttggttctcctttataatcaattgaattattaccaatgatttcttcttccttttgttctttaatcttataatttcttgctgcattgagaaattgaacttgtcttggtgtaccacttaataactcattcttagaaaatgtatatggactattatgagtaattttattattactattattattatcattattattaccaattgtaatacctttacttataattttataatttttcaaaaatgaattttcacaccattctaatgcagaattcaaattattaaacattacaatcatttcttgatctttctcagtttcccataacccacagtatttaaacatttcaacaaatccttcactattatttgatgttattataaaataacaatttttctccttaagtaaattcctaattcttttaaatccttcaattgcactaaaatcaaatgtaattatattatttaaatcaatgattaaatacttaattggttgttttttataattagcaatttcaaacatttcacgtattttactttctaatcctccaattgatccaaagaataatgtacctgttaattttaaaataaatatttgtttaccaacatttttcaaaaattcattttgtcttgaatttctaataactattgatctagcatattcacctgtaactgttttagttataacaggtttactacctgcttcaataataaatgagataaatgtaattaatataccaattaaaataccataaacaaaatcccaaatacccattgtaattacaattactaaaattgtaatatattcaaatcttctaattctaccaaaagtatcaaaaatagattcctttaataattcataacctaataaataaattaatgaaccaacaacacaaatcggtataaatttaataattttattaccaattaacataacaaaaaatgttgcaattgctaacattacaccactaattcttgaatctgcaccacttttaataaataaaactgaattactataaactaaataattttgaattgaaccaaccataccactaattaaattactaaaaccatgagcaattaattctctatcaacatcaaatgtatccattccaatacttaatgctaatgcaggtacattaattggtacatgtaaaataccaaaaaatgttaatgctaaaatagttggaatttgttcaataatcaacatccaatcacatttttgaaaatcataatattcataaaatgaataccatgaatcatttgatgtttcagtcattgtaaatatccaaccattatcccttgctatatctaatgtccaaccgggtataatccaaattaataaatgaaatataatgaaaatcattataaaataaattggtacaataaggggatttgaatttagtttttggattattataagtaaaattgacagtaaaagtggtattgtccattgaagtaagatttgataatcatcaaatagatatttaaaagtttgataattatattcaataccaccttgaattcttgatgaaacttcaatacctgttataattaagaaataaccaacacctccaatacaaccaattaaaatatgtcttgggaaaaatccaactaatttacctaatttacatttacctaaaatgataaatacaatacctgttataattgatgaaattgcaaatgtaaaaatagttgttgttataataataccttcatttcctgtaccatatttactttcgactgataataaaatacttaaagccattttatggaaaaatggtgtaatttcaatcatttcactaccaatacctgatttaaaagctgatccacctaatgaataaactaattgtgcaatgactgttgaaacataaaacattgataaaccaattgatcccatatgagagaataatttttcaccaacggggaacataatcataccataagataatgcatcaagtacattaagtaaagtgcctaaaaatactgcaggtaaatattctattggttttaagaaacattgtttccaaatttgatcttttgaagaatttcttaaaaaatcaatactatcaaatataggatttgattctcttctctttttgaaactattttcaaaagtataatttgatgaaaattcatcaaatgatgaatcatttattagttgactattttcgtcaaaataactattattattcgtattattcattacattttgttgataaggttcattattttgtataggttgatatgattgataaggttgataaggttgttcctctggtacatcaatatttgctaaatctgctgaatcttcatgaacagaatctgatgaatgaattcgtaacagacttgaatcaataggtgataaagtgttaggtttatatgaattatatacaaaacttctagccaatgcattaccagccgatactgatgattgccttgtacctatagaccaaggtgatgatctaccgttctccaccattgtctctctgtagaaagaataaaagaagaaacagaagcagaaacaaaagaacaaaatgatgtcaggaataagatgataatcggaaattgaaaaacttcgctcgtaaaaatagattttcttatcagtagccagtagaaaatggcattgatattggtagaagaggtgtttatttctcaaattggtatgagtggtatgattgttatgagtggtaaagtgatggagagtaatgtgggggtgtttaggtttggtaagtgatgttaatagttgtgtgaaaataaatagaaaataagttttattcaaaatcatgaaaattacctagatcataatgccgtttagaaatacagatacgaagtaagtgatagataaatagatgataattaagtatatgaaagtacacaatatagtgttctaatataataataatcattacacacataaacaattacaattcatcctttgcaatttcttcttccataacatcatcgactttaacattttcaatttcaattgcaccacaatcagcaataacaattggtttaacaggtttatcaccataacttgtctttgaattttcaatttctttaacaatttcaaaaccttcaacaactgaaccgaaaacaacatgtttaccatctaaccatgaagttttaacagttgtaatgaaaaattgtgaaccattagtatttttacctgcatttgccattgataaaagacctggtctatcatgttttaatttaaaattttcatcaggaaattttgcaccataaattgatttaccacctgtaccattatgtcttgtaaaatcaccaccttgaatcataaaatttttaataactctatggaaagatgaattaatataaccaaattctggatctttagaaattgataactgataaaaattttcaactgtctttggaacaatattaccaaataatccaataacaactctacctaatggttcaccacctctggtaatatcaaaataaactttatgagtaatttcaggtaattcaccagctgcggtgttacttgcattggttggattcatgtaaaagaaaactgaggcaagaattgcaaataagaaagctacaagtctcatcatataaagtgttgttaattaaatacataaattcaaaagaagacacacacatgtgttaacatgtcaattcttcaattcttcaattgtctagaaagtgttgactattttatagtgaggattttcctattatttattctttacgtaatggtttgttttaattttatatagtaagtctatcaatagtgtaagtggtaaccttggatctgccgttactgctacctctcttgttgatatctgtatcaaacttcatcatcatatcgaatccactcataccaactgttaaatcaccaatttctctctcttctctcttcttcttatttgattttttattagaattattattagaatgagaattaacaatttcaacattctttaatgcttgatcaattaatgttaataattcatgatcttttaataatgaatcaatctttaattgtgattgtttggttaatttattcaatttattactatcattggaataatgtaaacttaatatcataccattagaatcaataaatgaatttaaaatttcatatccaaaatttaatttaattatattatcaataattttatctaaatcaaatttagaattttcacttttaatgattttaattgtttcattggtaatcttttctgttgaaaattcttcaattaatcttttaattatatctttgaaaatttcatcattctcaacatcattcaattcaataattaaatctttacttggtatattaacacatgtaacaattgcttgtctttgtaatcttgggaataattttaatttactgattaatccatatgcaatatcaattggaaataatggatgtgttaaaaaatatgttataccacgttctggtatatattcttcatcttcatttaaatattcaaataatattaatgtgaaaaatttaactaatttaaaatcaacaaatttatccttttcactttcgaaaacttcaaatttattatttttttcaatcttttcaatacttaaatttttcaaatatccaagtataacattctctaatcctttaacatcattattttccttcaattgattaattttgtcaattgtatcatttaagttttcagtttcattcttaattaattgatcttcttcatcatcatcatttaaatatccttggaaagttataaaactattttcattttcaatttcaatttcttcttcatttggtggtaatggagttaatgcatctcttaatttacctaatccaacatcaattgaaatataatgaatttgtgaaatattttccttggaattttttaaaactaataatgcaaatgtattctttgatttaattgtattaccattaactattggaacatttaataaagttgcatttcttggagttttagtaaatccattgttattttcctttgatcttgaatataaatctaatgatgataataatgattcatatttaatatcaattagggaaactgtactacctttagttattaaaattctattagttgatgcacatttaattgatgttggagattccttcggttccttttgaaaaactcctgttatattaataatttttttattattaatcaatggtaattcatatgattctaataataattgataattatcagtatttttaagaataactaacttacctgatatatcaaatgtaaactgaatattattaagttttgaataatcatcaacaataatttcagaattggaaatttctaatatttcatctaaattaagtgaaattaaacgtacattaagtttattactatttttaactttttcaactattaataaaatattatcaactttttgagattttgaattaattgataattgttcaggtttaataaattgatgatataaaatttgattatttgaattgatattatcattaaatgataaagtttcaatatttgatttattaatttcttcgtcagttgaaaaatttaaaactgatattttaccatttttaaataatgcaaataaataatttgaatttgaatttgaaaattttaaaccaataatttcatcatttaattgaattgttttatcattaacatgttttaaattatcattagattctataatatgtctatcttcttcattaacaactgaagttgagctactttgattttcatcatcaatatttgtcttattattattgttattattaactttattattattattaccataatcaataaatttaatgaaataatttttacgttcattaatattaactgcgaataattttctttcattatcagtatttaaatctaagtcataagaatccattgcagttataattgaatctggtgataaagcataagaccaaatcatttttggtgatggtcttgttataaaagttgcaatatatgaaccgctaattgtaatatcaaaattacttgaatttgaatcatttatttgtgatgtaaagcaaagtttagaaatatctgatttactttgtaatctcggtaaattagtgacaacaaatgggtcataaatgagtgaagacatgtttgaattgttagaatgaaatgatatcaaaagaggttattaatgattaatgtagttaaaactagagatgaaaaaaaaatatttttcattaaaagtgaaaataaagtgaaataatttttttaaattttctcaccataataaaaaataatgcactgatgttgaaatttgcttaggagcttggtatagtgggtgtaaagaatgcattctttgaagctttgatcttatattactttgatcatacaatctttatagaaatagctgagataaatatggtactgacttatatgtaattttcaattttggggaacttttcattactatggtaatttcaacagtaaatatctcttttaatatcaatgatataccactgtaagtgagcctattcgattctctgatatcatttatacctgcatgtagcttttaatttttactgatgtttatttggaatctaaattatcaatattactattaaggtggctcattttatgaaaatttgaatatttcaatgatttatcaacaattaggaacttggctagatcatagatttctctacatgttactattcaatgatatctttattctgatagtgctaaaaaatcaatacaaatagcttcaaaggtatataaatcaccaaagcataagaaatacagctgaagaaagaaagtaagaaaacgatgagccataattttcccactacgcgtaaattgactttacaaggataataataataatcaaaattatttatactaatatacactttaaataataaaatagaaataacataacattacaaaatataggtaatcttcaaatcttcaaagcttaagctgaagcggaagaagtatatttagtaacagctctagtaccttcagagactgcatgctttgataattcacctggtaagattaatctaacagcagtttgaatttctcttgcagaaatagttgatttcttgttataagcagctaattttgaagcttcagatgcaattctttcgaaaatatcattaacaaatgagttcataattgacattgccttttgggaaataccagtatctgggtgagtttgttttaaaactttatagatatatgaagaataagtttcctttctagtcttagttcttttctttgcatcagttgatgctgcggttttcttacctgctggtttcttttctgctggagctttagatgcaactgtttttggagccatttttgttgtttaataagtataaaggaattaaaaaagttattaattaagaaatgaaaatagaataagtgggaaatcaatcatttaaatagtaaataatagtaaatagtggtagtatagtaatggtaatagtaacaaacgcggttacatgttatataataatagcgtactgaaatttacgaaaattaaaattaagttataaattgataattcgcactttattagtagtgttcctatttttacactttaaagtaataattttcataccgcgatatttcatatcctatttacttctattatacttctcctattactattatcattataataatcattataatttatattaatcattactattatgttattgataattgataattgatctgagtatataaatataaggccaattcctctttattgttttgattttaagtatattttattatttcttcttttacttcttcttattaaacaaaacaattattcataaattataaaaatgtccggtggtaaaggtggtaaagcaggttcctctgaaaaaacttcaacttcaagatcttccaaggctggtttaactttcccagttggtagagttcacagattattaagaaagggtaattatgcacaaagagttggttctggtgcaccagtttatcttactgctgttcttgaatatttagctgcagaaattttagaattagcaggtaatgcagcaagagataataaaaaatcaagaattattccaagacatttacaattagcaattagaaatgatgaagaattaaataaattattaggtcatgttactatcgctcaaggtggtgtcttaccaaatattcatcaatctttattaccaaagaagactgcaaaggcaaaggcttcccaagaattataagtaaattatatttaagtaaattaaactattgttatttaatttaatgtgtatattagttaattgatattattattattattgtaaatattgtaattgttaacatttcctaaatgggaaagtataccgatgacattgctgagccttctaagttaaacatctttttgataaaaattgcccctttttccaactactttctaactactttccttgtagattataaataacaaacagttttcccactttttacatcttttgcccttgtcactactacttcttcttctttctttctttctcttatttccttttgctttctacttcttatacaagggtctaatcgtcttttaatttaaacgttaatctctttacttttcttatactaaataaaatgccaatcagaagaattcttactatagttagagaacaatacgcatctcttcaaaagagatttggctctaattctgaaaagaaagaaagttcagctgctcctgttgcaactgaaaatgttgaacaagttaatgcagaatcaaatgttgatgatgttgtagctgatgaagctccaattgctgattcaaaagttgcaagtgcttaatttgcatattattggttattctaatatttaataatcaataatattgttctttgttcttttatcttatatctaatatctgatatccttttatcttttatctcttttatctctattaaatgtacttattttgcttttctttaactttttattattttctcttaatttggttggtttggtttcattgttatgttgaattggagtcattgttgtatcttatgttgtgttctttaatatctaatttgttaattttaatttcttaattctctttcttttaatttctttctttatctttttataatagtacatataaaataatattatttcctacactaaaaatacattgtaatataaattttatattaaccacaataatcccaaacattcagttcaccatttaatgatattgatacaagtatttcaccatcattataattatcaacttgcattattggactattttcaatttcacttgcattcaatttaaacattatatcttgtgattgaatatcccaaaaaattatttcaccgatttcattacctgaacaaatcaatgattcattattgaaaacaataaaacatgaacctaaacaatatttttctgcaattggtaaattattatcatttttgaaagttttaacaactaaattattgatataatcccataaccttaaataaccatctaatgaacttgataaaatatattttgaatttggtgaaaatataacattactgattgggaacgatgaaccaccttgtttatcataaattaaagttttcaaacatgatcctgtctctgtattaaataatctaattaatccatcatatgaaccacttacaataattgtatcatcaaatgataaatctaaacttgaaattggatctgaatgagcacttaaaattctcatatttttaccccttttcaaatcccaaattctaatattttcatcacttgaaccagttattaaaattcttgatcttttatcaaattttaaacaattaatgaaaaatgtatgatttttcaaaattttaatagttttctcaatttcaatatcccaaattctaattgttaaatcatctgatgttgatgctaaatatttattatttggagaaaatgcaatattggaaatacctttaaaatgtccaattaatttacattttaaaattcctgtttttaaataccataatttaattgaattatctgttgaacatgttgcaattaattcaccatttggacttattttaactgttgatgtaaggttattatcatgcgtttgtttaatactatatcgtagtttatattttggttctattgtcattatctaaagaagatcgagttgttaatataattgtctgaaatttcgatattatatctttcaattggaaatgtcatgaaaaaaatatgacaaagattacgtaataattcgatacatacccaaaattaaactgttaaagagataaaaatttataaagaaacgataagaagtgaaattatacaagatatattataaaagatagaaggaataaactatttaaattgttttgaagtttcattcatgacattttcataacttggaggttgatttgattcatttaatggatcaatatcaccatcatttgttgatccatagttattatcattattattattattattattatttgaaggagaaaaagatgtttgacatttaaaatcaccaactatatgagataaaggacttaaattattattcaaattattattttgattaatactttgactattattcctactattattattactttctaagaaaggttcaggatgactaaatctaattttagtttgatttggttgtttatgaattgttaaattattcttattatttggattgtaatttggatcatttgtatttataatgaaaatttgtctctcttcatcatcaattaatttatcaggtgaagataaaataatataccaagaatgaattgtaccaggaatccaacctaatagacaaaggcaaacattaattaaaaaatcacaagaacataaaccttttttgattataacaggtaaaggtgggaatattaaagctaaaataactaaacagcaatcaggtacacaacaacaacaacacatggtatagtctttgatgatatatttagaagtttaagtaaagcaaattataacttaataaagtgtaatttaatctctggcttgcgaaatcttaaattatttatacggaaaattaaattaaagtggaaaattaaaccggaagaccggtatctatctatctatctatcgatgtcaatatcctaaatacttacgtaagagactgggagattgttttgaatgactggctgttattatacttatcagcgtgaaacttatagcaatcttagggcattatattcaagttcagggctaccgatgagggattatatatcaatttacattgtagaaagcccaccttcggcagtttaactacaatagggttgttttcgttaactaatgaagaggaagaacaagataaccttattattatccctgaatgttaagtttatttatttagagaatcatgttaggaattaaaggttaaaggggtaatacgaggctactatataggggcaaactttcttattgaattcttctaattgtgaacgagttagttccctgtaattatggtttgattaagatttgtaacacttaccatttgtattaaattgtagtatattattaactaaaattttcctgttgttgggacgttattgccgagaatttgtgtcctgtattcttacagagctagtgggaaacactgggaattgaaagaaactaattaaatatgaccgcagtaaattagcaccatctagtaatttccagatagaagtggagtccgtgtaaataagcgaaaactaagtgcggctggatcgtattatagtcactgggacggtgggccataagagacaatacgaggcagaaaaagtgaaattttcgaatctattaatataagttaaaactaaattattagaatactgggcacgtaattaaaacttagggtaaacgttacattccgacgggaatggctgtgtttacgttgtttaaattgttggttgactaggaaataactcttttgacattgtgaatctttattgtgaaaagggggcactcgttgaaatttcttgttatacctattatttacatttatttacaatcatttacaattacgattgcaattggattgaaattggattgaaactatcgtataaatcagatccccttccacattccctgtttttcaatcctattttctaactgattcttttatttcttctttcttttcttcttcttctgtattcactattaatataaacgaaaaccatgtcactatcaataaataactatcatatgaataatacacatactcatcatcatcatattcaaatagagaaacctttctatctttataaaggtttaaaccctgaaagagaggaatcttttaaaatatatccaaatattgataataataataataatactactataaatcattcaaattataaaccacttactttaccatcaatatctttaccgttacaatttgttaatcataataataatgttattaataataatataccaaaattagatattacaagtactgaaatgagaaattcattatcttcatcaaatacttcctcaactttcactacaccactttcaactgataatgaaattgaaaatgaaaatgaattaattgataataatgataattatttatcacaagataattctataaattctgataatgaatcaattaaatgtcattatcaaggatgtcgttataaaggtacatttttatcaaaagattatttaagaagacatataagagaacaacataaacgttcaagagaacatatttgttcaggttataatgaaaatggtataaaatggggttgtaataaaaaatttagtcgcccatatcaattagttaatcattggcgtggtcaaagatctttaaaaagatgttccgtacctgtaatgaaacttaaaaaagctggtgtcttataattattgattccagtcaattgtcattccttacataaataataccttctataataccttctatactatacccatacaataataaaattattcaaattaacaatccccatcgataattgtaaattaatgattcaacagagtcccttttgttaaaaacttgttacaacattgtttcaaaaatggaaaaatttctagaaatttactaagcccactattttccatcggataatacatgatgagatataaggacatgaacttcctaattagtctattaggggtttagatctacctccatattatagtgttcggaaccagcgagctcagagagctaaaaaaaagaaagaaaaaaaagaaagaaaaagaaatgagactatccctatttggagagacttagttaccaacggttgcttggccttttcgctctttactttgctatttttaccgtcggaatgtttatttagctcgtttcgcatttataggggtgcgaaatttcacagttatttgttattatgtcatagattgtgatacatcatattgtgatagatcacatttaaacttaatttactaatatcatatttcgaatggaaagtatttaaaggaaataatcacagagcaacgatgaagattaaaactttaaactcattagaaaagtttagaaaagaaaagaaaaaaaaaatcataaaacaaaatgacatcagaatcttgggacttgatggttgataatgataacaatagtgctaatgaatatgaatttgataatattttatcgccggtaactacaaacactaatgcttttataatgccgaaacttaatcatgataacaacaatagtgataataatgttgatactgttactaatagtaaatacaatctatttgatagatttagttatattcaattaactgattatatttggaataacaaaaaagttttaattaatgataaacataaaagaggtgatttatttaattggtttattaatttaattgatttaaatattattaaatgtaaagaatttatcgatcaaaatgaaaattctttgaaaaaattaaagaataaacgtcaactattgctgtttttaaataaaaattttcatcaattcataaaattaattcaaattcaaatacaaactcaatttcaagttcagtattgaattcaagattatcattatataaatcatcactgaaaaattctaaaaatggtacaaatagtacaagtttattaatgattattttaagaattatattctatttgtttttctcatggattacaattttttatcttgttttctatacagaaattttagattatctgtttgttaatgataaacaaaaaatgtatgcattgaaaatgttaagacatgttgttcgttcattaattgattgattttatacttttattgcttgctttttgttattctttctttaattaaatttactcttaaggttactctctctacctttaagtttttatacttcctaattgggtaattaatttttattttttaaaatttcgcgaaatattcatgtgagcacctctccttgaagagacttgtcattgacctgacatcaattttcaacaacagtcgatgatatattaatgcaattttaagctcagcaatctgtatctataatcaaagcaatgggttcattaactacttttattaaagctattagaaatagtaaaacaattgcaaatgaaagagcaatcattcgtaaagagagtgctaaaattagatcatcatttagagatattaatttagataatgataaaagaaggaaaaatattgaaaaattaatttatctctatataattggagaatcaacatattttggacaggttgaatgtttaaaattattagcaagtaatgaatatattgataaaaaagttggttatttagctacaatgttatttataaatgataatgaaattttgactttattaacaaattctttagatattgatttaaaatcttcagatcatttaatcgttggtttagctttatgtacattaggtaatgttgcaaattatgaattagcaaatgatttatatccaaatattgaaaatttaatcaattcaaataaattatatattaaaaagaaagcagttgttgttgcttctgcactagtcgaaaaagattcaaatttgggtgaaatcttcttaccttacttaaatgatctattaaataataaaaatcatagtgttttattgagttcatgtgcattgattgaatcaatttataataataatgaaatcttaagaaatgatttaattaaattaataccaaaaattttatcacatttaaaactattatgtaattctggttatagttcagaatttaaaggtttacctgatccatttttatttgtttcattattaagaactattagaatcttaatgagtaatgaaggaattaatgatggaaatattgataaaaatattgaaaatttaaatgatttattaacacaaatttgtgcaaaatttgaaaattgtaaacttaattcaggttatgcaattttatatgaaactgttaaaacaatttttgcaattaaattagattcttcaattaaagttttaggaatcaatatattaagtaaatttttaattcaaaaggataataatgttagatatgttgcattagaaactttattacaagtgattgattatgaaccattagcagttcaaagacatagaagtttaattgttggatgtttatatgatggtgatatttcaattcgtcgtagatcattagaattaatttttaatataattaatgaacaaaattttaaactattaattaatgaattaattaaatatttgaaaactgagaatgatgaagagattaaaatttacttaacaaagcaattattaatatcaattaataaatttaataaaaatacaaataattttaattggtcattaaagattttaattccaattttaaatttatcgggtaattattgtaatgaaaatattttatcaacaataattgcaatgattatgcaaagtaaggaagatcaattaattaaagatatattaaacgaattgattaaaacattaaaggaaggattatatgatcaatttggattaatgattgtaacagtttggtgtttaggtgaatattttgatttaatttctaatgaatctttaattgaagataattcaattgatataattaattcagttttatcagtgtcgaattattttaatgaaaatgagaaaaatcaacttaaaatttatacattgatgacatgtttaaaattatcagtcaaatttcaaaattctaagaatattgaaaaattaagacaaattattaaatcatttaataatgatattaatttagatattcaaattagatcaattgaatatttgaaaatatttggtgaaaaaatgacaattaaaaaaggattattagagagaatgcctgcacctattattaaaactcaagataatttatcattaatggatagaaccgtgaaagagagtagtagtgttggtaatgctagtgctagtaccagtaataagggtaatattattgaagatctgttaggtgatgattttaaaacaaattcttctggtaaagagacaaagaaagaaattaaggatacaactattgatttattatctgatatatttggaagttcaagtataaaacctaatgaagttaaaactaccaatactaatattgttgaaccattatcaattgaaggatttaaggatgaaaatattaaatttggtataattgaaggtgaaattggagaaggtaaatgtgaattacaggcaattgttaaaaatattaatttaaataattatgaaattaataatttatcagtttcatgtgctgtaccaaaatcacaaaaattacaattgtcatcaattaataaaactaacttaaagaatggagaatttactttattaaatattcaaattactggtaataaaggtagtaaaattaaaattagagttaaattaagttatggaatcaataataatggtattaaaattgataaacagtttgattttagtaaaataactaagttattgtagtagttttataataatgtttaaaatagaatagattatttaatgattacgtaatataggcataaattgcgaatttttttttttttatgatgagaaatcctcaaagggcaaattaaaaatataaatttacggatgtccatcgagagagcatgtccatttttttgctttaaaaacttcttttgaagatcaacgacaaaatggatttcaagaacattcaagctcaagcacaaaaatatttaaatcaaattgaacacgtaagtattaattaattgagttaattgagtcaattgagttaatgggaattaaaattggaattggaattttatgagctagtatactaacatataattataaaattttatatagaatactaaaaatgtttcaattttagatacatttgaaggtcaaactaaattacctagatcatatgcagttttaggtttaggatttgtttattttttaatggttttccttaatttaggtggtattggacaattattaagtaatttagcaggatttgttttaccaggatattattcattaaaggcattaaagagtaaagcaaaggatgatgatactaaattattaacatattgggttgtatttgcatcattacaaattattgaattttggtcaaagacaattttatattggattcctgcatatttcctctttaagacaattttcttagtttatattgcatcaccaagtactaatggtgcagaattagtttataattcagttattttaccaattgctaataaatatattacagttgaaccaacatctgatttaatggataaagttcaagaaaaggttgaataattgatttatagtatattattattattattattaatatagtgattgtttagttattgtttagttatcattcagttctttgaattgattttatacttatacttatacttatacttatacttatattaatagtagtaatctattgcttatcaagatataataatcgataatttaagataaagataacatcgatgaatatgagacgatgcgtcgacagtgggaatataacaccgacaatttcaatcggggaatttatactctttaaagataaacaaatcaatcaatcaacgctgttttaaaaaaataggagcggaattcaaccgttgagaatttgaaaaaagaaaatgtccttttctccgacccggcaattcttaattcctcaattctgtattttcatttcctgatatagcaaaaattttatgcggtataagggggggggggttactcagtttgagtcattctaagtgggaatgggggatgattattatattgtgtactttatgttatttgttatcttctttataattgtaatacaagttctacgtagaaaacaggaacataagacggagaaatgtagtccatccgtagataaacgttgaagtggtttaaagaggggaggttgtatagtagtaatagcggagaatattaatagataaagagttatagtaagtgattcccttagtccagtggctattactaataaataatagaaaaaatataaaaagttaaagtccgtttccccatgagtcgcacattatactttgatgtgtcaaagaaattcaaatttaattttataatttctatttaacgttttcttattgttcacttggggttatacgtgaccttgttgttttaaatctctattttcatttctattttcaacgttgctgaaaaggtttaagttttttattttattttttataaaaaggtcccttatcctttcttttgttttgaactatcccacctccccgcaatttacttaaactttttaatctatttaagtttcctttttctttttactttttctttctaagagttctttattaaacagataacaaaccattaatcaatcatgagtcaaaatcatttagatactcaatctgttaacggttcatttcaaacttttaaaagtgatgacgaaaatcctcatcatttagataataatgttgaagaaatgattgaaaaacctgttattaattgggaaaattttaaacattatatgattacaagatttacagatttattccccacaaaacaatcaatgcaagcaaagagacatttacttaatcctttaccaggtcttagaatgattggttttagacaatggttaatgattttatctgctttcttagcttggtcttgggatgcttatgattttttctcaatttctcttaatgcttctcaattagcaaaagattttgataaaactgttaaagatattacttggggtattactgttgttcttatgttaagatctgttggtggtttctttttcggttatttaggtgataaatatggtagaaaatggcctttaattgcaaatttattatgtgtctgtgttttagaaattggtaccggttttattaaaaattatcaacaatttttaggtgttagagctgttttcggtatcatgttaggtggtgtctatggtaatgcagctgcaactgctttagatgattgtccagctgaagcaaaaggtttcatctcaggtttcttacaacaaggttatgctttcggttatcttttagctgttgtctttaaaagagcaattgctgataatgcaaaacaaaagtggagagcaatgttttggtttggtgcaggtgtttgtttccttattacatgttttagagcttcattacctgaaactaaattattcttaaagcaaaaagaaattgaaagatataatattgaacatggtatttatcaaaaaacttttaaagaaaaggcaaaggcatcattaaaagtttattggttaatgattatttatatggttttacttatggcaggttttaattttatgtcacatggttcacaagatttatatccaactttattaactgttagatataatttttcagataatgcaacaactgttacaaattgtgttactaatttaggtgcaattacaggtggtattttaattgggacatttctctaattttacaggtagaagattagcaattattggatgttgtatctgtggtggtgcattaatttatccatgggcatttattgataatgcaaatattaatgcaggtgcattttggttacaatttttcgttcaaggttcttggggtgttgttccagtttatttatcagaaatggcaccaccagattttagagcattcgttgttggtattgcatatcaattaggtaatttagcatcatctgcatcatcaacaattgaaacaacaattggtgaagatttcccaatgacatcaccaaatggtcaaccaatttatgattatgcaaaagttatggcaattttcgttggatgtgtctttgcatatgttttattagttacattatttggacctgaaccaaaaccaaaaattgaaaataataataatgaaaatgaaaataatgaaattgacgaagatggtcataaagttgaagattatgaattaaatgaaaaagttaatcatgaagaaatttatcaagttgaatcaatttcaaatcaaggtaattcaaaggcaatttaaatataacgtattatagtataactggtttataacaaaaaactaaataacattctttacatcttttctatagatttttcaaattaaattaaattaaattaaaataattaaaataacaagaacgatgtgtttaattacgtaattactaaaagataagtataacgttagtatctcaatccttatactacaggggttacactaagagtgaaagtatattagagaggtttatagcattcaatattagaattagtaaaatggatattatttttgaaagtttacgtaataagatatttgatgtattattaacaaataacaaaacaagaaaaataggatttaaagaaatgttataagataataatagaacaaggtacaggatgttacaagatgcatgatgatgatgatgatgatgacatttaccccaggttttgtataattattatcttagtatcgatattattacttaatttaagtttatctaattaatattaatatcatccgggtagaataggagtagggtataagggtatgtcctccgactctacggacaagtcccgtgagttacccggattttactgtaattatgggattataccatactaattaatatccgatttattccgaatatcgtagaaatgcggataatatactgttctataattgtgttataattgtaataacataacaatttctattgtattattactcatactaatggctttaaatttatgtacacaccacattaatgatagaaatagggtaagagtaaaatagaatatagtagaagagtagtatatggtgaatacatttattaaattacatctgacattgaaaatgttaaataataaaccaccaattaaaccaggatataccaggatattaacaatttacttttacacccccactctccccacactaataaattaaatctatttaattaaatctattttaaatcccgggaagaatataataattaaacaacactaattaaatatttttacaagtcaaaaaaaattaaattaattaataatctccggggttactttaccatttctatttctatttccattttaccctattttaccctatttcttacaagttctataaatatcaactgtaatcccgttattattatgttatccaaaacccttttcttttgatttttgtttcttaagataagtattattatattaatattatattatattgatcaaaatggcaccaactgctgatgatatccaaaacgaatatagacaaagtgtctcaactgaacatgaatctccatttaataaaaatgaaagaaaatcttcaattgcttcaaaattaggtttaaatcctgatgcaaaaattcattataattctgctgtaccaatcttatatgaagatggtttaaatgaaaaaggtacaacaatttcttcatctggtgctttaattgcattctcaggttcaaaaactggtagatctccaaaggataaaagaattgttgatgaagaaacttcaacaaatgaaatttggtggggtccagttaataaaaaagttgatgaaaatacttggaatatttcaaaatcaagagcaattgattatttaagaacaagagaaaaagtttatataattgatgcttttgcaggttgggatccaagatatagaattaaagttagagttgtttgtgcaagagcttatcatgctttatttatgaaaaatatgcttattagaccaacaactgaagaattgaaaaattttggtgaaccagattttacaatttggaatgcaggtcaattccctgcaaatgtttatactaaaggtatgacatctgcaacttctgttgaaataaattttaaatcaatggaaatggttattttaggtactgaatatgcaggtgaaatgaagaaaggtattttcactgttatgttttatttaatgccaattaaacataaagttttaactttacattcatctgctaatcaaggtaaaaaggaaggtgatgttactttattctttggtttatcaggtactggtaaaactactttatctgctgatcctcatagagaattaattggtgatgatgaacattgttggtcagatcatggtgttttcaatattgaaggtggttgttatgcaaaatgtttagatttatcagctgaaagagaacctgaaatttttaatgcaattagatttggttctgttttagaaaatgttgtctatgatccaggttacaagaaatgttgattatactggtgctcatgttactgaaaatactagatgtgcttatccaattgaatttataccttcagctaaaattccttgtcttgcagattctcatccaaagaatattgttttattaacttgtgatgcaagaggtgttttacctcctgtctctaaattaactaatgctcaagttatgtatcatttcatttcaggttatacatctaaaatggcaggtacctgaagttggtattactgaacctgaagcaactttctctgcatgttttggtcaaccattcttagtcttacatccaatgaaatatgctcaacaattatctgataaaatgtcagaacatagttcaactgcttggttattaaatactggttggtgtggtgaatcatatgttaaaggtggtaaaagatgtccacttaaatatactagagcaattttagatgcaattcattcaggtgaactggctcaacaagaatttgaaacttatccaactttcggtttacaaattccaaagacatgtccaggtgttccagcctgaaatcttaaatccttcaaaattctgggcaagtggtgttgaaaactttaatactgaagttactaacttagctcaattatttatggaaaattttgaaaaatactctgctggctgtaccgcagaagttgttgctgctggtcctgcattataaacaacattagtataaatattatatcccttcttccatccatgtgtgtttttttgttcagttatttattatgttttatttaaatttttttaactttttttttctattttacgattccagtcatatatattctttataaagcatcattttatatatcatttaactaaaagtaacggtataatgaaaagaaaaaaaaataaaattgaaattggaatttagaattaaataaaaatgttatatatgcgattatgatttgtagaatatgttatatagacttaacaggtaattgaccattaactaatacaggttttggtaaatgtttttcatttatttgaatattgaaattattcttcgaaacaatttcttcatgaaacttgataattaaatttgataaaggttcagcataccaacgttcactattaaatttgaaaaatccaacatgaccacctaaagttgtattaatcattgaaatgaaatggattatatttacattgatcaattggtaatgcaccaacttgtaaacctccagtaattggatcatctaatgaacttatattaataaatggagttttaatcttagttaatttataaattggtgaagcatttgtataataatcatcagcacaagtaaatccaaacattttcgatgtgaaaacattatcaaaatctcttaatttccaaattttcctaatgatttgattagtatattgtgatttaaagattggattttgaattaattcatttgaatgagattttaaaagcatcattaatggaaatgtcattgcagttgaataaaataatgatgaaatgaatccattttcaaggaaatatgatgaacctcttaaatcccaaattgatgctaatgaaattgctaatgaaacatttgaattttcaccttcctctgctaaataattactcataacaattgaaccaagactaacaccaaataaataaattttcctatttggatatctctctttaaaaaatttaataatttgtctaatatcttcagtccataatgcacaaaataattttggtgttgtaagattaacattaccacaacctctagagtttacaacatataattcaaattcttccctcctctttgtgaatattttattatataaacatctaatatatgattcggctgatgaacctgataatccagttaatgtaattacaatcgcttttgaatcagttgaatattgattatcaattcttcctttgtcatatatcttaaattattatcagtaatttcaggttgattatcaggttttaaaattttatccttttcataattattaaattcatcaattgaaacaacatgatctaatgcaacacaacctccatcacttgcatatctaatttgacgtgtaaaatatataacatccgttttacgaaatcttctaattccagcatacattgtctgtaaatgtccattaaataagaatggattaaataatgaccatgcattttctttaaactcaggtatgttttcattaataaattctttcattgtaattggaccctttaatgattcattattgaattcaattggattatatggatatgatgttataactctattaattatatcataattattgaaaatttgaaaaatactataaattataactaaactaacacaaaaattttgaaaaaacgaagttgagataccaaatatattaataactgaatataatttatctagtatagatatcattatgttgtatatctatgtagttttgattgatatactactatatcgatgataaaagaagtcttatgtaggataggaaaagtattttgcgattatgcaatgtcatcggactattaaaaaatattttttcaaatttgaacgtgaaaattgtatattataaatttaatggattattgatttgatctttaactatattatatatgagatgtttaagagtattccatgaaattacaccaattgtgcagttttcttaataaaactcatgttagtaaaaataatatttcccagacaaaaataaatgtttaaactccttatcaggggctcgaaccctggacatttcggtcgacttcttaaagaattcttaaaagccgaacgctctaccgactgagctaacaaggaatttgttgaaagtattttttatgctttgacctaagatggtattttggtgttaaaacacgtgacctcaataaacttaaaaattatatcaagaactaaggctgaaattaagcttgtttgaaaaaggaatgctctttttacaaaatatgagaagtattggtaaaaaagataagctataaggaataaaaaatgggtataattatcagtatttaagagtctaaaagggcatatatatagaacaaaacatgaagtagctccgcttgcccacctctttgactactaataataatagatataactagattttataatttgaattgttctttttactctgataaaagttatctgagggtactcaagatatcatataaaatattggtcaatagtaatttgttcacattgtatttttattctaaagcaatcaaaaacaattttatagctcaaataattagagtagcactaaaaaaagtgtttctaatatgttttataaacttaagtataaattaatgcaatttctattttaaatttttttaattttttaatcacttttgcattttttcaataaaaatttatttttcaaaaatttgatgtgagacaatatttaacatatacagtacataaagataaatatttgatgtattgtgacaaaaatcaatgagtttcccctggcagatcataaagtatgagcatttttttaaaaaaagtcacgtgaaaaaatagcaacgagggtgcgcaaaagattttaaaaccatgtaagggaataaatacaagttgttcaataatatccacgtgaagattaggtaagctgattacgtaaagatgataagatggaaataggaattccgagatacggaggttcggagatgtcggagtaagaaaggaatgacttagattgaaattgaattaattatgataaggagtggtatgattgataaggaatagtttaattaactatattaaggaatggttaatattgtaatataaataagtatgatatcctgtataactttgtataactctcttctgagaggggacattaatcagagtattagttagagaacaatctactaattaataccaaccgtctcattgctactcgctgtctattacacaaataaaaggtccaacgagtaaacttattttatacttattacttccattacgtaattaagtattatccactatcttacatattttagtttacaaaccataacttccgatgtagtgtaatggctagcacggttctctctcacagagcaaatccgggttcgattcccggcatcggagcacttatatttttttaacaattttaactctgtcttctttaaccttaggatcaaagcataatttttactcctttcttttttaacaagctaataaataaattaaagtagaaaatctattataaaaaatgtaaactctttaaacaatgttatctaaaactaatttggaatttctaataaaatcttacctgaagtttttctaccttccatttcaattgttgcagttttataatcttttaatggataaactttataaatatcaatttttaaatcaccatttttaattaaatcaaacaataatttagtataaaattgaaattcttcaggttcagtaacataaccaaataattgaggtcttgcaattttaacattttttggtgataatctagtaatacttaatggagaaacagcaccagaagcattaccgaatgaaacaattgtacctttacgtttaatagatttcatatccatttcaaaagaatctttaccaatcgaatcaaaaataccatcagcacctttaccattagtaatttctaaaattttatcagcaatttgatcatatgaaagttcagatgaatttaataaaaattctgcaccatttacttttgctttatctaatttttcatttgttgaagcaacagcaataacatgtgcttttttaattttacttaataattgaaccaaaattaaaccaacaccacctgcagcagctgtaacaagaatataatcaccttctttaacattatatgcttcattaataaaagtaattgcagttaaaccttgaagtaaggaagctgcataaagttttaattgatcatcagttgcatttgatcctacattaataattgaaactttatttgaatcaagtttagtaaattgagcaaaattttggttaccaagataagcaattttatcaccaattttaaaatttttaacatcggaaccaattgcaacaatttcacctgatgcttcacgtcctggaatatatgggaatgaagctggataaataccattacggaaataagtttcaatataattgatacctgaatatctatttttaactaaaatttcatttgatgcaagatcagatggaactgggaaatcagttgaaaattgtaaaacttctggacctccggttttatcgtagtagataactgattgtttttcaggaattgtaacagttgtagacattttatttatttgaaaggtaatcaatggtttaatattcaatgatttaggatattgaattttccttctgaataatgtaggtatcgaaggacttttgaataggaacattgtggcacagtgaagttgatgttggcagaagggagattcagcgagtatttatagagagagtttaataagagagatctgatgctgagtaagtactccacagtttttattgttgcgcccggaattgtttgaacagcgtgtttgtaagggaagggtattgattattaatcagtgtataggttgatcaattaacagtctttggatacaggatgttgttcattagtgtatggaggttattattagcattctcagtggttagtggtgatgaaagtgtgaaatattatgtacgcaagaacagttatgataatgttactaatccaacaatttacaatgtacattcaagtggggaagaatacacatgtcaaataccttcaaatgttcatttcaccagttctgaaattgaatcactgaaaagttctagtgaaatgaaattagagaaggataatgcaattgaggttataaaagaatttaatcttcaacatagaaataatactgcttttaaagagataggttattggaaatatcttgtcagatttgatcatgatattcaacaattccatacagatatttatgatggtattaggagagttgataactataaattagctgcttggtcagataatgatgataatgattcatttgattcaataccttattataaggatgataattccaaaaatccatatttatcaacatctgattttgaattaataacttctgatgatggaactaaatatgtctcacaaagaattgggaatggtgaaatttgtgatataacgggacgtagaagagttacaactatcaactattattgtagtgaacaagatattaatccacatatacgaaatattcatgaatggagaacatgtgaatatattttcgatattgaaagtatctacttttgttcctttgatatgtggacagaacctaaaacttcaagtaataatgtcatatcatgtgatttgaaagtagaagatgagatagatgaggaaattagaactaatccatctatatcaattggatctgcctaagaataaattagaaccattatctcctggtatcttcttactaaagaatactacaaatagtaaatttgatttattattgactagaaattataatctttgggaaaatgaaactcaaaatgaaggatttcaaaaacttttgacagatatttcacttaggatttcaaagatacatcaaaaatctgagattcacaattacctgaatctgaggtcaaagtagttaagttaactgacccaattaaaataatttttgatgtttatgatattgatagatcactaataggtgatgtagtattagaacaagatgaaaatggatttatagtgtcttattttacagatgaagaatccccatttgataccaactgtttatcctgtatactttaaataacatttttttatcttatttgtaacataattcgaatctatcaatgtcttacttataacgagacgaaaatcagaattagaaaaatttacaagttataaaaatacataataaatagaaaatgaattaatctactttctccttttatatcttgatggtctattgctattactattattaattgccatagatgcaggtagagtaccttgagaaatatgttgcaaaacaggtattcttttatccagtggtagatttaaatctgttacctttatagtttttcttctctattaaacctgttagaagtctctttatcttattataaagtttgatttcttctttaccaggttttaaaactttaccaccatttgttaatttggtcttatcagttataaatctcttttgtttttcatatcttgtatgacgaatactattcaattcagtaagatattcactaatcttggcttgaacattattatttgaaataatttcagcttcatcatcggaaactaaattgtcttcatcataacttactaaattatctaaatcaattttttcatcttctgaaaactttactaatttaggttcttccacggtatcttgcatttccacatcagtattaactacttcagttacttttgtttcatccttgttttcatccttattctcaactttatcttcaattttgttttcatccttgttttttactgtattttctactttggtttcatctttacgtttcagttgttgtagtatctttcttttcatcatctaacaacttccttatcaccttcatttaaatccttcttctctgcaatagtatcggcatcactaataccaaatgctttttgttctctattagacttttgtttcagatcaaccaattttttaaaaccaacttgttgacaccaagttatccccttccaatcatttgaaattattgattgtgtttcatcatatgaaggagcaaaactaaaatttaatgaagttatacccgatccatgtttaagccattgagatgaaattaatcttaaccaatttggatgcatataattttctaaaatttgtttaacatttggatatttgatatcggttggaatgaatttagccaatgtatcagtatttctcatagaaatatttggaataacattattaatagttattccaagagatgcatcaatcactggttcacgatcatctaattcggattggaaattattaattgatgaaaaaaatggaatacttcccgctgagaaaatagataatgatttacctgttttattatagaaaactgatgtgataatatcgaaatctttttctaagactgaatcaagtccttctgtagtttcaattggtttcaattgtgaaatttgcttttgaatttgatcatcattacctacatttgtttcattatttgtagaatcagtttcatcaactttgttagattcattagttgtctcagctgttcgattttttatttttcaaacttacacctaacttcactgcttctctcaagagtatttcaacagaaactttataaaattgatcaatagctgaatataatgttggattatcttcaaactctaaaattttaataatacatgcaagtttaatatcatgaaatatatcataaacagattgatattgtttattttcaaatttagattgtaatgaggttttatctgattcagctattgatggattagcatctaaaaatttaagaaatgaatagtttatatctgcaatatttgtttcaaaaaaggtgtctctgttagggaatgatgttgaaagaactcctgcaatgtctatgtgcgcataaacatgaaaacagattattcaaaaataattcaaacacttcctcttgtccttctgccattgtatttacctttacgaaaagaatgtatgctgtttcaacaagatattagtttaaaatagatctcctaataaactcagagaaacagcaaaggaaaacaatttcgtgaacgcagacttaaattttctcactacatgacaaatttgaaatttgattttttggctctttttttaaaggatttactgtaatttatcttaattttaaatgtaatctaatattattctacacaatatgtacagagtctatatactattaaagagtttcccaaatacccccttttttggattgtgtaaccttttctggtaaaagatcaacacctccagatccactggcaatattagcaccgtatcttggaacaacgtaacattctctagtttcatgtcctttatcatcaactttaacaacaggtttacctagtggtttggaatatgtaattaatcccgtggatttaccaacattagaaagtgcaagagatgttatatcatttaatggctgaattctaattttcttagatttaccgctacttttttgtaaatgtgaataaactaaataatctggtgctttacctgttttcattatgatactactaggatgaatgtaaacataagaatctgattcttcatatgtattagatgtcttttcaggtatataatttggtgtgatatatggaatgttcattattttcatattattacttaatttgaattctttgttaatagtatctaatctaaatgcaatttgatcaataaaacccgctgcaatcatttgtttaatagctgaaacttgttgttttgttggtttagccaacttcatttcttcttcagtgacaacattggaaactgcaatggattctttcattgtatgcaatttaacaatataagtcaattgttttcttaatttcaaaatttctttcatttgcttttctcttaaaaagtgttcttcataaaatttagttctcctattcttaggaatatgatcacttgcacaaatagcagataagagctttaaactatcgctatgtttgtctaatttagaaaacatttcatgtgatttattgaaacttttgtcttaattttcttttattttcaagatcaaattgtgacacatgttcaacaactttttcatagtcatcatcatctccatcaccaccctcttttttagcagcagtttcattaacttgaattcctaaatcatattctgataaaaatggatcaccaactgacatacctgaaactaatgcaataacataaggcaaacatccctgttgattagcaattaataaaatcttggaaaatctaggactcaatgggaacagactcatctttttaccaatacttgtaatagttgccttttgtttatctaatgctcctaaatatttcaataattcctctgacttctttaacatagctctgtttggaggagttggaaacggaaagttgataactgtttgaatacccatacttttcatatttaaaacaacaccttcaactggcattctcaaaatttcaggtttagaaaattgttcgaattcactttcataaacagcagaggagaataatctataacaatgaccaggaccagttctaccagctctaccagctctttgatctgcacttgcctttgaaatccaatcaatctcaaaagattgaactgttgtttcctcatcatattttctttcctttgctctaccacaatcaacaacatatctaacatttggaatagttaacgatgtttcagcaacatttgtagcaacaacacacaatcttgaaccttttggaggatcttcaaaaattttcatttgttcactagttggaagtaatgagtataacggtaaaacatataatggatcattttcagtttgatcttcttctaaagtttcttcaaaaccttcttcttcctcatcttcatcatcttcattataatcttcattgatttcaatttctttgacatcaaaatcaatttcttctgcttcaatatcagcattattagcatcaactttcacatcgactaaatcattatcatcatatgatttatcaacaatttttttaccatttttaccctttaaaggaaattcatttcttaactttttaaccatagcaacaatctcagctttacctgtcatgaaaactaaaattgcaccctttggtaatcttctatgaattttacacgttttcctaaatgcttcttcggtatattcaaatggtgtacgtttattaaagtgaacagaaacaggatattgtcttgcatcaacttttaaaattggaggtggagtatcaaataaaaccttattttcactgaaatcactaactcttaaagtagcactcataatgattagttttagaggatgaaatttgtcaggttgtttctcatgatattctcttcttagttttaaaactctactaagcataccaattaaaatatcagtattaacatttctttcatgagcctcatcaataattaaagcagagtatttcattaataataaatcagtcatcatttctcttaacaagacaccatcagtcataaattttaaagcagtttgatcaccaactgtggcatcgaatctaatttgataaccaactttatcagaataattacctaattcattaccaactctttttgccatagaaactgcagcaactcttctaggttgagtaatacctatcataccaggggtatcagatccctttacaccataaccagattcaaaaagaaattgtggaacttgtgtagttttaccagaaccagtttcaccacaaataatgacacaatcattatgatgaattgcttccattattctactttcttcagcaaaaacaggtaagcttgatcttgcctcctgtatttcattatttctaataacatttactgtaacaatttttcttttcaatgattcattaattggaataaaatcttcctttaaaccatcatctaaatcttcttcacggacaatagatttatattccatttgaggtgcaacaggcgcaacaaaggattcacgaccctcagcttgacgtgcttgctcttctgcccaagctttaaaatcttttgctttttcagtgtgttcttttttgatattaacttcaatttcaacatcactttcttcatcattctcatcactggattcctcttcattttcttctgattcatccccttcatcatcttcgtcgtcgttgtcttcttcttcttcttcttcttcttcttcttcttcattttcttcattatctttatcatcttcgtcattatcgatttcagctacactaccttcatcttcattctcttcttcactctcatcgctttctgaaatgttactatcctcttcaagatcttttccatcggaactatctccatctccaacttcttcatcagaactatcactcaaaaagtccatttcatcttcttgttgcttatcttttttttcatcttgttcaatcttagttctccatgaataattcttcttcttttttttaggtttaaccttttcaatatcaccaaaaccaaaaccagtacccattccagaaaaaggtttagcaggtctatagtcaatgaatcctccactagcagcagaagtacttttaaattcattttcatcatcactgacttcatctttttcggaaggtttattatcttcaagtaaatctgaccaatttttaacttctctttcttcataaagaagtgctttagtttcatcgttaccctttccaagtctttcaagttccattgcttcaattatcttttctttcttggtttttctatcaccagtaccaattaatttagcagatcttaacatacttgtatcaattcttgtttcttctaactttttgaaaagaatttccttttcttcccttttgagttgatgttcgatatacttatcaagtcttttcttcttttttcgagagatcttttccttatgttgctctaaaagctcttccttaattcttctctttctcttcgacttttcattttcaagacttgtcattgtattagtttcattgttaattatgttgttttcagatacattttgttgactagaattattctcttgatcttcattatcagagagagaagctccggctttaccataaaaactttttttggccatttctaaggacctttattgttaaatctagcaagaattgtatttctctaatccaagagcaataaccacaggtattataccaatccaatcattaagataaaaagagttaaaagcattgtaagtgaaaaaaaatttgaaaataatttttttgtggtggcacagcctgaaatttgattaagttttccaggagcatgatttcatgatcggattctcatttctacacaaacaactttataaatagtatcacctttaatcaaggaattgccaaaggtctagataggatctaggatattggaattaatctatttgatatatattaatgtctgatgtggataataatacgaaaaatggtagtgttccagatgtttcaccaacaaaacttcgaagatcaacaagaaatgtaagcagcagtgtatcaccagttaaggaaacgaagagtgaaatcgagggtaattcagaagaggaatacggttttatcgattataaaaatgtcaaaactattaggttaggtagatatcagtttaatacatggtatggaaactcagctctttttaaagaaccatatcatgataaaataactaataccatgtgtacagaattggaatttaaaacagtggatccggaaccattagagacagtggtagatgactcaattaggatttctcaaaagtatgaagttgactcggagagtaaaaagccttggcttgagactttgtatgtttgtccatattgttttaagtttacagatgttcaattggaatgggaacaacatataaattattgtaaatccaaaaacaaactcccagggaaagtgatgtataatgatggtgaaactgtgatacggaaagtgaagggtgtaaatcataaattgttttgtcaatgtatgtgcctattagcaaagttctttttggataataaatcaatattctatcatttagagtattttgatttctatgtgatttatcaacatctagataggcatgaagtacccatgggattttattcaagggaattattatcatgggattcaaataatttatcatgtatatgtgtcatgccatgttatcaaaaacgacgactaggaacaaaactgattgatttttcatataatttgacaaaatatgagcaacaaataagtggacctgaacatccattatcagaacttggtaaaataacatatctaaattactggtgtagaacaattgctattctttttgtgtatggagaattatcagctaaaaaatatgtcactttacagatgatcagtgaaactacaggtttcagaatagatgacattttcctggcattatcaactttgaaagttttataccacaacggcaaaaagaacccagatatggattattacttggaaagatataaatacagtgatcattacgtgtttgtgaaagatgaaaactataatgtttatattgacaaaaccaaactaaaaaagtggattatagacaataaggtagagaataaaatgattttagataagaattgttttgtgttctattaaatccaactactcattttccttacataaactactgcttaaataacttttgtaactcttctaatcttttcttctttctttcttcatcactcatcgtcaaagtttcacctaattgatttttactagcttgaatctctaacatcctttcctcaatactatccttcataataaacctaataacttcaacgtttttcaactgtccaaatctatgtaatctatcaattgcttggaattcaatagcattattccaatgcggatccattaggaacgctcttgatgctactgttaagttcaaaccaacaccacctgcctttaaacttaataataaaattgatattttcttttcatcagtttgtggtttatcaaagtcattcaatattttttgtctttgttccagattaagtctaccatcaaatttcaacacatcaaattcagcttcaaacttacccaattcagtttcaataatatccaaaaaactagtaaattgtgaaaaaacaataactttctctccaggcgattcttgtcttatcatttctaaatgaatcaacaaagcatttatcttggaagatttttgatttggagcaaatggtcttacaatataatctctttctttcaaattttgtgaaattgtcttttgtgtcaaataatcactgccagtgtcaatatcaaccacatcttgtacaacattagagttttttttaattgtcctgaaaagtctgtttttattgattctcttctctacacattggacagaaaactttttcatttactaatggagaattttctgatgttttaccatcagcttgtttttcgtgttttagttgaaaatcaaaatgttcaatcaaacaacccagacaaaagcaatgcttacattctgtaacaacacaagtattgattttaatatcatcagtacatatagcacattcaacaccatcaaaacttggatattgatcatatatttcatttttaagcttattaatctcttcaagaggaattttttgctctttttcaaacttatcaatagacctaaccaatgataccatttccatatcttctttaactgataatcgcttttggtcaagtggtttattattcaaaatatccaacttatcagtaagtaaagtgttatcagtattatcattagtgtgtgttataagatcaacatgacaacaaacttgacgaagccttagcaattgagtcaaaattgtagaatagtttttgaaaactagccctgcttcgacattttcattgaatgagttcacagctctttctttcaaccatttgtaaatgatatcttctcttttgttaaatttcagtttttcaatactaacatgttttggtggtaattcggactaaaaactttccatttgaatctttttgatttttggttcttctcaataaaataggatcaaggatggatttcaaaagttcttttgcagattctacatctttaccagtatcaaatggaactgaaatacattgtttccataatgaatgataactccaaggcttcaaacctagaaaatgaaccaacgaaaaaagatcttccaatcgatttataataggagtacctgtaagaacccattttctatctgcttgaagtgagtaaattgctttcgcagttttagtagacttatttctaatattatgaccttcatccaatataattctcaaaaacttgactgaaaataaacctgtacctctatgaagattctccagcttatccatttttgaccactccgattggatcataccatatgtagttaatactactgttggtgggttgggaccacataacattctttttaaatttccaagagagtcagaaccataataaataaataacttgtgatcttttcctttggtaacttttatgaattccttttcccattgtgtaagtaaagccataggaacgacaattaatgtagtagagaaagcataatccttgatcttttcaatatgattatccggcagtatatcataatagtaatctttaggaaacgataaaaccaatgataaagtagtaattgttttaccaagacccatttcatcagctaaaataccacctttacaatttgatttaattattggcttttctaaagaacatgtacccttgtacagattcatgtaaaattgatcattgcaatttggaggtaaatctacatcttgtagacgatcctggtaatactggccaagtatactctttccacaaagggttcaccagattttcatgtaatttcaattgttctattacatcatcccttagatatttcatcagtgtcttcatcatttgaaccaattagttcatactctttttcacgttgtaacatccaactcaaacctaatttttgatatggtcttaattcaagattaaaattattaggtgttgtttcaggtaaactatcctgaagattattgatttctgtgtttttatataagtccttgatatgattcaatgataaaagagatccatcttctgagttagactcacctccagtaccatcagttggagttcctgcagcaatttcttcatcaaactccacatttttctctaaattttcaacttcagagctaccaaaatcatccccatcttcatcttcgagagtaataggtttgtttaagtcatctgatgatgatttagttgtattttgagcagatttaagacctaatttatcaaatagtttcaacattaagcttttcaaacgtgatcctgcttgtatattaccacctgaatttttcatcatttttatttgatcagcattaaattcatcattatagtcagcagaatttggagcttcaaatatattttcagacaaaaagcagtcagttctaataacaaaggggtcacctgtacttaatctctcatcatccacataaaacaacttactttcaaaaaccaccgctttgtcttctaatagtggtccaataagttctgccatttcctcagttaatctaccaagttctcttttgaaattactattttcaggtttgtgattgacataaacagcaccggatccaggttgatttacaaaaattaacctgttgtgttcataaatggacttcaaactaaaaaccgatcttgtacaccaacacgaaatgtttatagttccaatgtattttttccatttattatcgtttataggcttttcagctactgatggttttcctattgatttggcgttacttttctttcccgatgtatttcgtgtttttggtttggcttcctttttgaaaaactttgacgtttcattattaccaataatagaatcaattccacgttttcgactttgatattcatactgcattggctttttcttttctttgatcgctggcgtactcttcatgattggtttagtgaaactttgaggaaggtctaagtaagcatttgtggcatcttcgattggtgtattggagccttgaaatttttcatagagaagtttaacagaagtttcactaatgccacccaatattgagatcaaaccagttctaaatagtacaaacttatcatctccaggaaccttttcttcaatattggtactgggtaaaattgtcggtatgctatgatcaaaaaattcgccatcttttctcctttcttcattcatgactgtttgtaaatggtaaaatatatcttatttttcaactcttcagcagtaataagtatagtagatatgtcaaataacgtaccttttagaaagatctgaagaacttaatgaaatattttttgttcatgcagaggatattttgaagacgcgtttaacatggtgtttacaattaggtttaaatttatttgcctctcaaagttcatatagattgaatttgaaacaataatcattccgtaagtaaactataaagatactggaatattaaaaagtatataaactgtaaaatacacatagcatcagccaaaaatacaaaagtaaaatatattgtaaaaataatatctatttttatcaatatgaaaagaagagaagaagtgaaagaaaagcattaaaacacaacagatcattaacattaagaagtgaaaaattgaaaaatattgtgatcaatacattcttttgatactaattgaagaaaaagcccatattataatatataaaaatcaccatttgacaaagtgtcccaaaccagaaactagcggtaaacaacctagttatttttttttattttttttattcaaacttgaacacaaaagtaaagagatgaaacagttttatgattccataaacatctgctaaattgttttgaagtttattttttttagaagttaggtattatgaaaaaattgttgagtttagaccaacaaactcgataaaaaagtaattataattttatcaagtgaataatgtatcaagttcagccagagagacattttcaggactttcaatatcttgattcaaaaatccagatctaacagtttccagccatttggcacttattgaaggttcgatagaggtatcagtcataattgaactagttattgaatgaacagcatcactttgtacaccactatatgatccaagcgctacaactcttagagcagcaacagctgcagcagcgttaggtgtatttgcaaatgattgttttcttgggactctaggtgtaagagcagctgctgtcactattctttttggactttcattatgtttgccttgatccatatcagaagacgatgaattacattttgatctcttattaacaaaactaattgattttgatctttttgtgaaaccaaatggaactctttctgttacaatatctgagccacgtctataatatccgtgattttggtatagactgtcatcatcatcgtcatcatcatcttcaaagtcaaccttgagtgaactatacacatcatcatcattatcagaatcaggaactgatgttaaatattcttgatttttactaacaataaagtctccattatatgaatctgaagtagtcattttttcatcaattggtgctgtaatattcagagatgcagtcaccggagcaacagaatatggaactgataattgaggaaatccaaaatcaagtgtaccattagagaaaggtgatactttattcaattgaagtccagcaggtgatattgattgtagagaagataaatcaccattaggtaacttactaaaatctgataagcttgaatcagaagattttaattttgatgtataaacaaggttggaatcattcatatctaattgaaaatctgttttctcggattcaacaggattgaaaccatcattattcatatcaccatcagaagttgattgaacattaatttgtgataaactttgattcaatttagcagaagcgtttgctgcagcatctctttctctatgctgctcaataatcttttgaacataagctggatattctggcgataaaataccacgataaacataaaccattctttttggagaggaatctgcccaatctctggataaagcatagtgaattgatgaatcacccttttcaacctttttaacataagcattcagttttgcactaaccaaattagaagtttttgatgataatttagacatatctggatgtttttcaactagtatatcacaaatttgtttaacagtcataccttgactttctggatcatgatcgaaaagaatgatgaaaattgctagcaaaacatcatcatccattgaagcatgtgtatcaggttttggtctttctccagttaaaggaacagaagttgagacaccacttgcaaaattgataatacgtggagtctttttctctttcttctctttcttttccttttcctttttttctttcttttcagctttggaaggttttaaagtttcaagagaagctgtacttattgtttgtgaagagatagattttgacattgatgatgattcaacaatatttaatgaagttttagagatgtctggtttaatatcagaaattgaatgttgcattagttgaagttgttgaagtaggcgtagaacctctatctgtttctggggaagttggagcagagtccatattatttaaattttcagtattgaaatcagagaattcttcagatgaattaatatgatcttgtgacattattttaaaattattataggagaattatagttttttttttaatcagctaaagctttgaaatatggagagatatccgtctaagttttatataatcaagataaatgaatattaatatatgatgctataatataaaactcgggctctaagaagttataccaatttcaaaagcttaaaagtataatatttgatagaataaaaagtatattgaacttaaattagaatgagtttgtataatatattggtttgaatcaaataaggtaaatttaaggttacaattgaaatatgtgtcaaacaagtgaaattattattgttgtttaataattgaaatttgaaatcaaagtaacgtttttagttatcttaaatgaaacttaatgaaatatattgaacttaacaagatatgatagactgtaaaaatatagaagagattagtatttggttcttgtgggggaaaaaataacttgatatcatcgtggaatacttactatttgatctattattaaatttgttattactcaaaatgtggttgatttaagttgattataattatcagaaatattagttaaaatcttctgacttaatgaattaaaaataaaaagtgtaaatataaaaaggatcttgggaatgatatattaattcaataaatatcaatacaaaagacttattttcaaatatagtcaaaatgagtattctaaaatactttttatggaatttgactcagttaaggttatagtcttaattaaaataaaactaagattacaaattaagaaactccgaagagtaaatatttagaaatacagggacttcaaggactcaatagaaactttcaattataggtaagtataacataatcggaaaattattaaaatctcacacaagataaagtaaaataaagtgaaataaattggtacaagtcaagtgaaaaagaataataagataacacttaacaataatcggaatgtaaatgaaattgaaaataagttaaaaaggtaaatagatcaaaattaaatgtagataagcctaattgggaacaaatggcattaatttaacattacttctaccctttttgcccaatttggaaagtgtgcgtcttttttgttatttttgtgtcatctcaaattatttaaataattttgacagtcacacaatttagtaccaacgcaaataatttaagcctaaatgggataccacacgcgcaccaccttacatgcccaatacggtaattctacagattaaagaatgtgaacgcgaaaaaaaatatttttttgacgtttaacgttgaatttgaattttatcgatgttttgatcatttatctagctttttctataaataatatactaatacaatgtgttaatgtttctattttaattatttctatcctattttttcatagaaacagatatatgcacttccatcactttcaggagctttacccacattgctcaatcctatcttatcatcatcaaatttaatccatttgttattctctctcacatctgatgtataatgtccactgtttaatgtcccataatgtctaacaattccacttaatctatattcgaagttaccttcttgacctctagttgggaaaagtttcaactttctttgttcttccagatcctttacctttggaatgtatgtacccatttttaaactcgttggtatatcaattgttttattgttctttacaaattcgtatctattattgaccgaaaatctctccaaatgaacaattaaaactttgggtaatcttgtgattgttagctgttttttagtacttttacttttttgacatgaaggacatttccatgcattattacctgttaaaatctcaagtgatacaaaattatcaatgcaatcatatatgttcatctgtgttttattgtttggtattggaactgaaagcatattaaagggtatatatgttgttgatgttctgtaacaatttgtacattcaagtcttgatgcatattgtcccgtgaagatttcaacaattgatgaataattagttatgagatatctttcccattcaattgttgatgctaatctaatcggtaaaatttccctgtttttctcatcttcatcagttatttctggtaatggatttttacttgcagccatattcaaatcttcatgaatagaatctaaaaggaagtgtaaaaattctgcagaatcttgttgatcataattatcaaatagtgaattgaacttaccgatggtttttttaaaaatttcaggattagtaggttttttcaactttgtattcagtgccatcgtttcaagcaatttatgatattccttagttaattttcctccagaacttgattttgaagttttagatatttgattttgatatgaattttgcaatacatacgttgataaatcatcggttccaactaaacattgcagtgaagcgtttaagtaacaggaattacctaaattaaccaaacctgaaataatcataggagatgatttatcaagtttttcaattgaagataaggaattataattagtaggcttttcgggaatcttaggctttttcaactctagagaattttttcttctgaatgttggtgaaggtgatctagttctattagatgatcttatagagtaatgataactatctgaatatgaggaatctgatttttgttgtgaagtatagctacctagcgaataattactggtgttatatttattgatagtattgataaaatcataatcattgctggtattatttgttctctcatttgtcatataacttattggtgatctagatctggatattgttggttgcattacttgggtatctatattgttcatattcgctgaattactacttatctttggaattataggggagatagcattcgcagctatactgtttggatcattattcataaaatttttccattgattaaagccaccttccaaaaagattggttttcttttcagtctgaagtggggatttctatttttctcatacaaaattgatatcaggttctttaattcatttgatgaattaaattgagaagagttttgatcaactattataatcaaatcataagcagctaatttaagaaaacgatccttttgtgttttattactaatcaaaaatgaatgcagggaaatatcatcaattgtatatgacggtttgactgatacgggatctatatttacaacatttgaaaaaatggaaatatgatctttttcaaacatcatttgtggtctgaaatcgattatcaataccgagctattaaacttatatgaaatattaatcattgtttcaatattaatatgtgataatgaagaataataattcaataatttttcattttcatttggtattggtgaaggtgatatagatcttggcctgtcagaaatttgagctggttgaatagatgatttcatataattactagtggtgttggtgtttgttattttagaatttgatgataaattttcaataagctttgatttttcaacaatcattccaccattaatcaacatgttaagtctggaatgaatattattgttataattttgtttggagatataagctttgatttctttgaatcttttactatgaacattaatgacattttcgaaaaaatttcaactcatcattatttttatcaatattaatacatttttctaataattttctagcagcagtataatcggaatacatttccttaacagattcaatacctataatatccatagatttattatcaacttcatctgataaaaataagaaatgttcaacacatgttttcaaactactgaaaagtttggaagttggaatagatgatattttattatctactatatcatccaaaccttggaaaatggcttcagcatcacgcagctgccgtattaaagatctctgtgcaattccagagttagtcgtctccatataacgtatgaatttactttgttgaatagaaaaaaggcttgtaataaactccctcctttaccgatttgccacccatttaaaacgtgcatgatttcagtgtcataaaatttcaattcgcttatcttttatctgatcatgactgatagatcactcaaatgattaattgttactttagtttagttgagatagttgtgtttagtttgatataatattactgtgatgttgatgggaatttattaggtggattgaaggatagtaagtactacattaacaggattcactgagagtataatggattaccaagttatatctacaagtatttctgatgttacgtaatcatgttataaaaggttatctaatctcttcagttaatattatatagtcttggtagttatgggagaagataggatatgaattacaatacagaagaacttccactactcatcatcccaattaaactcttcttcatcttcttcattatcttcacttgtactcttacttaagagctcccttctcttttgttcatctttaataatttcagctcttttaccaaaataaaccttccaaaaatcatcttctgatattttatcaacttctacacttgcatctgtagcttcttcatttgatttcactactttcttgaatacttgcatgagatgtaatgaatcatttgatgagagctgtgaaatttctttagtttcatcatcagttaatttataatctttgaaaagtccatccttcacacttgataaatataatgaggaatcactttgaagttcatgaacttgactttcagctctagtacctggactaataccttgtggtaaactaaacagaagttctgatttagtctctttagataaaacagattctggtgattcaccaacaactaattcagataattgtttaccccaagatgaccaattccatgaagaggttgaattttcagatttttcagtattattactagtagttattggtttaaagaatgaaccaatctggccaccaatttgttgtgcatattcaattgtcatattttcaattttctctaaatcattatcaagactatctaatactttatttgtattttcaccatatttatttaatatttcattactttttagttttaaattattaatattttcctcattaagataagtatctaatttttcaggtaatttaacctctggtagtttaacctctggtaatttaacatcagaaattttaacatcattccacttgtttctgtaattcaggcaatttaccattaactaatgcttgaaatttactaataccattaattgttgattcttgaattgaattataagctttatcaacttcagattctaatgaattaactaattcatcagttttatcatcatgttgtgcaatttttgggccttcagcatgctcagcgtctttagataatgtgttttcaatagcttctggatccattgttactgttaatgaaggaaaagggtggtaataattaatgtgatgccatggcaatgcctccataataattcattttttgtgcgctctctaaagttaaaggtgcatgtcatggaatggtgatttagctgtaagtctttaaagtgatctgtagatttatctgtatcaaagacatcactttatttatgccatcccagatatttgttactccttcagtatattcaagagtagagagtagtttaactagaggttctaaacctattgctgccaatttcccatttttaaaagtttgtgagattaatacgattatagcattaacaccaatatcaatttatgaaaaagaggatgatgatttaattaaatttatacaagataatagtataaaatattatcattttgcaactgattcatcagttaagaataagggtaaaaatagacaaataccaattacacatgaacaagttaatgaaaattttaagtataattttaatgaaaaattctggtaatatttatatttattgtaataatggaggtcaaataacatcattagttattgcatgtttaagaaaattacaattatggtcaaatgttagtatatttgatgaatttatttgttatagtgaaagtgcaaatcataatgatagatcatttgttgaacaatttataccaaatattgaaattaatcgtagtgaaaagattgaatggttatggcgtggattaaatgaaagtgttatattaaatcatccaagtttaaagcaaattgtatttgtagaataaaattattaatattgttcttcatattagaataacataccagcggccatatcaacattccattgacaagcttttaaggcattaagagctgataatttatcaaatcccatatctattcaaagtatttaatttagttgtttgatcatttgaaagagctgatgttgaagttgagtctgaagctggagcaggagctggagccttagatgattgagtttgaaatgatttattttcttctttctttacttcattattaacaacttcctgtatcatatcttgttttataccattttccttttgtaatttattaacttcccattcatttaagaattcaacaaatgtattaccaatgaaaataccattttcattcagatcgattttaactttaaatcttttcatccaatctaaaccaattaaaacacctggaccatccattgctaaaactgttaaacttgttgcacaagattcattattaattataattggaactgaatgaattctaccattactttgcatttcaccaacaccttttgccttcatttgaaatcttgtatcaattaaatgtttaatatcacataaatcacataatgcaggtgttattaaagatctttgagcaccagtatctataaaagcaggtaattctttaccattaattgaaattttaatatataacattgtaacatcagcaaaaaattcaggagtttcttcataagcttttgataaattatcagcaattggatcgaaatggtgttataataatccaatcatcattttgaacatttgaagattctaaagttgttttatctgaaggtggcaaaatattaaatttatgagttaaagtatgatgagttggaggtaaacctgtctctgcttcaacataagctgaaacatcagctaaagtcattgaaccaggtaaatcagcactaaagatagtaccattataatggaaattaagtttcattttgctaatttaaaagaaaaaaaaagaaaaagaaaagaaaagattaaatgattataaatgatacaaagatattattagattagatatatagatacatgtagatataggtatagatatagggttattataaaggagcgagcattgtaagtgttcttgaactaattaacatacgatcagatattgaattatctggtgaacctgcaacttcagtaacattatccataactaaattaaccagatcatcaaaacctacaagggtaccttcataaacgtgacgatctctaagataaacacgaagttttttaccaacacactgatctagcagttctaatggtaaagtcatagtttcagctggactgggtgttgtagtttcaggacatttatgtatgtgtatgtgtgtgtagagaggtgttattgcactaactataatatacctaatcctataacacatactacactctaatagaagatgcattatacagtgttaaaagtgatgaaaataaaataatagtgtatatagcatattacgtaatactaattaagtcattcgcggatttattaagaggtattaatataatataaggttggtatctagggtattataatttatttattgattcattcattcatttattgattcatttaactacaactttcttttattatccacaggaccttcattgataatgactcgtccttctcatttatgtttaagacctcttctcttagaggatatttctcaagttgtggaattagaacatgtaggtttccctcctcatgaaagagcttctcctctacgaattgaatatcgtcttacaaattgtcctgaattatgtagtggtttattcattcgtaaatttgatgaaaataaaatttctaaaaatgaactacccgatcatagtaccgttatttcagaaactttaattggtcatgtaattggtactaaaatgttatctgataaaattactaataattcaatggaagttccaaatgattttatttcaattatgtgtaataaagatggttcattaatggataaatataaatctgaaagacttattcaattagagaatgaagaaaaggaaaaaattgaaaaaaatggaaatactgaagaagaattaacatcaacaacaacaacaacagcagcagtaaatgatgatgatgatgatgatgatgatgatgaatcaaaggattcaaaacaatttggtcattttgataatggtaatacaattggaattcattcagttattattgatccaaattatcgtggattgaaattagcaactcttttattaaaagattatttacaaaaaatgagtcaacaatatgttgctgattcaattgctcttatatgtaaggaaaaattaattcctttctatgctgatatcggattctctgataatggtattagtaaatgtaaatttgctggtgaagaatggcatgatatgactattcatttagatcatgaagatgatgaagattaattatatatatttaatctttcctcgatatatattttactattgattaattgatttatatcgttaaatcaatacatttagtatttatataaataatatagcttttttataatctacatcttataataataacccaaggttttaaccttataattatccttatgttctttatatccgacaatcaatactataatttattgaattatctccgagtatttttttttttcaaatttttttttattttctttcattaacatgaatttcttttctttataaaattcatatatcttctttaaacaaccatggctacattcacatacgtcaactctgaaaaggcagacagaaaaaaaaatgctcctattaaagcttcatcttctaattctgaaatacctacaaaatcaacaaaatctaatgaaatttctaaatcatcaaatacacagacaactcatacaccagaagaattagaaaaattctttaattcaattcaagatgaaaagaaaaatcgtaaaattgctaaaaaggaagctcatattaatgcattgattgcaaatagagatggtaaattagaggaattagcaatggaagaatcaattggtgaaaatggtaaacgtgcaattggttatcaaattttgaaaaataaaggtttaactgcaagaagaaagaaagaaaatagaaatgcaagagttaaaaagagaaataagtatgatgctgctaaaaagaaaattaaatctgttagagctgtttatagtggtcaacaaggtccttacgctggtgaattaactggtataagtaagaaaatatcaagatctattaaacttaattaattttatacattatttacttacattcggcattttttattataaatcttttctatataaaaattttgagcaattcttcccttaatttattaacatctttatcttcccaatcttggaaattaagttgtaaaaatcttttcatcttttcactatctttatcaattaaattaatctcctcttcatctaattctgaaaattcttcaattatattaccacctctatcaattatatcaagtataaattttgccttttcaataatttccttatcaataccacatctatatgcacaatataatcctccatgaatcttttgtaatcccatcaatcatctcatataaataagtaatatcaaattttttatcatcatgaactgaatcactatcaatatcttctgcaactataactttcatttgtttgaaattaatcccttcattcattccaatcatatcaggctcaaaaatctcagttaaatgtgtacttattaaaacaattggactttcccttaagttaagaaaagtatttaattatactaccctaataatccgggtccatcattgacatctgtacctttaccgaactcatctattaaaactaatgaatctttggtatttttatagatacatttactcatttgttgacaatctttcataaatgtactttgactacaattaatactatctaatgtattaattcttgttaaaatattggcaaatattttcaatttcccgaatttagctggtatataacatccaatcttgtgtaagataaatagttataccaatttgaactaatattgttgatttaccactataattaggtcctgtaattaccatcattttcttatctttagttattttgatatcattactgataaaatcttgatctctcataagtatattaaatgaacccgtcaaagtgatgcaattcagttcctcttcatcatcattatcatcatcaattatctcaggtctggtaaggttaaaatttttagatactaatgcaaagcaaatcatcacatcaatttcacctaataaacggatatacatctaatatattattcaaccccttattgaccaatctatttttcaattcatataatacttcaatttctttatctcgtattaaagaatataaatcaccgaatctttcatccatctctctcatggtttcattcttataataaaatgtagttgatgtattgaaaactatttcaaatccttcatattcattattttcattaccttttcaattgctattaaatatccaaattgtggaatatatgcagttattatctcagttccaaatcgattagttaattgattagatgtttttagtaatatattttccattttatcaaaattttgttgtaaattttgtaattctgcattataaccaaattgaatactgacattatcaatatctgattcataatcaagtacacgttcgagttcacttcttaaccttcttactaaatcaacatcaatattttcaatatatttcttgaaaactttgcattctaataatacatcactactgtcaataatatcccggattctaatcatgtttatcaaaaacactcttaattgtttccatactagtacctttaaattctccaacttgtaaactattcactactttgcaaatatcaggcatggttctgatacaatctaatatttgtcttattattgattgtttatatccaccttccatttcaaataaaatcgatgatataatgtctaatctatcatttatcttcttcttatcatataatggtctcatcagatattcatttagtaatgattttccaattctggaaccacatttatcaaacaaatcaatcacgctctttttaccgtcttcaccattagataaaatgttcaatgaaaccatactatctaaatcaatttccatatatccgttaagtgaatttagttccattgattttatcatatctgtctttctgtaactatgatgattcatattcaatatttcaaaatttagtgataaagcagatatcaatccacactgtatttagttattttcaatgttagtacttttattcgtcattattgtaataaaatatgttaagacttacataatatctataatcatcttgtgattctaaacgtatcaaaaatgatatgaaatctctatcaccatcgcttcgtttgagctctctgagtaaatcattaaaaaatatttcaccttcacaactactaaaatctttatttgccttaacacttagtttaacaaaaaatccaagatattcttcactaacattcaaactcatcttcactttactattgcatattaattcttcaggtttaaactgattcaaaagatttttcatgatctctgaatcatcatttgttctactgagaggctcaataaattgtactttaagtgataatggatcatagtaacaaatatagtattttccctcggtgaagtatattaccattatcgatgttgatgtgtgatttgttgtgttattagcggagtcttcttgttgtgtaactaagtactcattagtgcttaatatcttattgaaattattgcctggaggctcagcgtcgttagtttcagaatcgtcatctaatatacttgaaaagggacgcttgttgcgcaattgtgatctgctctttgcaaagtaactactactagtaggcatcattttaggatagacaaattaaaatagtctacctaacaaatagaaaagaaatcaagattttcatggaagtagttgaaagtcttatgttaaaaaaatttcttgttacttttgctcccttttttttccttttaacacttatttactgaaatattcatcattcatcattacattttcagtaacagtaactaatagtagagtataatgccattaagtcatattgtaaatcaatcttacttcttcctgaattctgatcgattgtcctcaaacgtacatagtaataataatgagaacattcttataaaatcgggtagtaaccttggatcaaaaaaccagaaaccatcctctaaatttcatcatgatcctgaaattccaataccaaaaccatcaagccttttcaaattagatacagtagcatctgacaaagttctgacaaaagaaactatgaaatcttgtaaaatttcccgtgtagtgttgatttcctgttcagatattcaattgcttaaagaaactgtattcaactgtactgaaagtaatgatttcattataagagagtatgtaattggtggaaaaaaagttttatttgttggctggtataacatctccaatgttgagcctcagattaacataataaggaaaattgcatttaagcaccgattaactgatattaagtttgattgtattgaaactgataaaatgtatcaaatagtaacatctttttctaatttcaaaatcttagacaatgtctttgatacagtatttattcatgttgttccaaatgataaattgaatatttcactacaagaattgaatcgtttaatattaactaatttttccaactatgggaaaatacacaactttaaacaaatagatgatttgccgatgtgttttagagcaagattttctaatatcagaaatgcattcattgtatcaaagataaaaatagttcaaatattcaaaatcaaaattttcacatttcatagtataattgaattggctgactatttgaaaacaataaaagtaaataattttaatgaaacaactttaaaatcaacctctgtggctgaaatgaccaaatatagttggcttgttaatagacattttgatttgaatcagcatgagaccaaaataaatttccaaaaaagtaatgataatgaaatagacaccactaaaataacactgaatttagataaaagagtaaccatcatgattaaaaacattccaaacaaaatgacacataaaaatttagaagattttgttgattattcaagttatggaacatatgagtttttatgtaagtattcagttgcattgaacgaattcaaactaaagaagatatatactaacttatcaaattttaaaaatagacttaagaattgattttgaaaataaatgtaatgttgggtatgcatttatatcattcaaatcgcctcatgatataattcctttctataacttgagacacggtaaaacatgggcatcattcaattccaaaaaaatatgtcatcttgtgtatgcaaaaatccaaggattgaataatcttattgacaagttcaaaaattcagatctgcttgtacataaccctcaatatggaccacgattttatcagacagatagtttggaaatgactgaaaagtaaaattgttgtaaaaatagagtaaactttttgtaatattatcatgaaaaatctataaagctgtttagtaaaagtaaatatattatttttgaggttattttgggttttccttcgactcagactcggattcagattctgaatcaccatttagttcaagttccttgcatttctttaagaaatcaaccatagattgggtatccactgatgcatcaagaaaatcttttggaacgtgattctgactatgtgcttttgttgcgaaccttccactattatgttctgtgactaatctaaacttgatgtcatcttctgatactgacatggtagccaattcattccaactaaataacaaaggatctgtactcctttgaaatgggtttatatcaatcaaataaactttgttgaatggttttggaacataaacatcaaaaacgaagctattagcctcatttttagaaagtaaaatatcatcgaaaaaaattcctattttttcagttaattcatcttgaagttcatctaagaagttataataatttaaatctctttgagaaatagcaattaattgtctatccctaacaaaacaacggaattccatagatggattaatttcgacccatttcctaagaactaattcaagttcaaattttggtgggtttgatttgtcaaaatcacaggcctcgtcaaatgcatggtacatgtcatgatttaggtaatctgatgattttaaaagtaagaataaatcagttgtggaatagcatctcatatttcttccagtcataatccatacagagtcttgaggtgcggaccaattgagtttaggtgcaacacttccaaattcttttatcttctctcttaatgtgagatgaaaatcctcaaatttcttgattgactcatcagttcccttttcattatcatcattttcccaatcactgtattcattgtcactattaggactaacatcttgaaaaagaactgaatccttttttgtatcttttggaagttctataccatcactttccaaatattcaatgaattcctttgaaagaggtttataaatggcagcttctgaaaaagtgtaatctttaaactttgagtaccaatttgagtaactacagctcagtatatcatcaactgtaatttttatttcagcaaattggccgtcttccatcgttttcctctgacaaactataaaaatctataaaaactgcatgtattagtaagaaattcttaagaattttcatgctcttacaacaattttttccaattttgcgaaaattgcgagaatgtccaactggaaaagatttcatgaatttctataacactttgctctctgaaacttttcattatttgcactactaattttgattcattgtaattgatctttattcaaggtacaacttcaaaaaaacatagataatgtcagctgtagtttctaacgctactttcaaaaataaggaaaaaccgcaagaagtccgtaaggcaaatatcactgcagctaaggcagttgccgatgcaattagaacttcattaggtccaaagggtatggataaaatgattaaaaccaagactggtgacgttatcatttctaatgatggtcacactattttaaaacatatggcagttttacatccagcagcaaaaatgttagttgatttatcaggtgctcaagatgttgaagctggtgatggtactacatccgttgttgttatcactggtgctttattgggtgcagcacaaaatttacttgataaaggtattcatccaactatcatatctgaagctttccaaagagctgcacaaagatcatgtgagatttatcttgatatgtctcataaaatttctttagatgatagagaagctttaatcagagctgcaaatacatcactttcctccaagattgttgcacagcattctagtttattgggaccaattgctgttgatgcagtactaaaggtcaccaaaaaagatgctagtaacgttgatttgaatgatattagattagtgaaaaaagttggtggtacaattgatgatactgaaatgattgatggtgttgtcttaactcaaactgctgttaaaaatgcaggtggtccaatgagaatggaaaaggcaagaataggtttggtccaatttcaattatctcctccaaaaccagatatggaaaataatattgtcgttaacgattatagacaaatggataaaatcttaaaagaagaaagagcttacattttaaatatttgtaaacaaatcaaaaaggctaaatgtaatgttttattaattcaaaaatcaattttaagagatgctgttaatgatttggctcttcatttcttatcaaaattaaacatcatggttgttagagatattgaaagagaagatgttgaattcatttctaaatcattaggttgtaaaccagttgcagatgttgcatcatttactgaaagcagacttgcttcagcagatcttattgaagaagttgaatcatctggatctaagataattaaaattacaggtattaaaaatgcaagtcacccaacagtttctgtgatatgtagaggtgcaaataatcaagttttagatgaagctgagagatcaattcatgatgctttatgtgttatcagatgtttagttaaagaaaaggcattaattgccggtggtggtgctccagaaattgaagcttcaagaactttattaaaggaggcaaatcaattatcaggtgcagaacaattatgtttaactgaatttgctaaagctcttgaagttatcccaactactttagccgaaaatgcaggtttaaacccaatcgaaatagtaactgatttaagaaataaacatgaaaatggtgaaagagaagcaggtatcagtgttagaagatctggtgcaacaaatacatattcagagcatgttttacaacctgtacttgtgaatacaagtgcaattacattaagttcagaaaccattaaatctatcttacgtattgatgatattgcaattagtcgttagtatatatctgtgtaacctatttataactttaagctaatagtaaaattattcgaatactattacgttgtttaggcatgaatgtagttgaatcgtaaatataaataaataaataaaataaagtaaagtaaattaacaggggaaagttaataatgggaacatctataaacaaattgtaccatgaaagattttatttgacaaatttgacagcatttttactaaacacataactcaaaccactccaaatagtagtggttgcaactgtccattccaaatattggatgtaagtaaggaaaatgttggttgtttccaaaccaaatctatcagctaagtataacatgaaaacaggtttaatcatcattgatcctaaataaagcatttgcaatgatgtattgatcttacttatcatagtagggtgaacttctgcactgggtatactaaaatcccaatatctccagaaagtttttggtggaggtaatgaaagatatctaataaaaacagcagcaattcccaatccaacatctctaccaataattatagctgcaatatagaatggaatttcagaagtagtagctaaacaaactgtacatatcatcattaacattttgtccgcaagaggatcaataacacttccgacaacagattgtaaattccaacgacgtgcaataaacccatccaaaaagtcagtgacacatgaatacgtaaacaatgataatgctaaagtaacctgtccgtgaacaatcagatatccaaccgctggtgcactcacaagtctagtaaatgttaggaaatttgggacagtgtaaacattttcatgaatatctgcaggtattatcttctttatgtttgcactcaagtcttttgatctttgtatggttttcactttcaaatcatttgaaatgttagtcatttgatctttatttttcttgatcatttctttaccttctttcaacactctgttgctattagttttagtatctttgattagtttttgagcatgttgtgaaatcgtcgttctgtcagcatttttgatagttttttcttcatttaaatcatgacagtcttgtttttcctttaaacatatacttgtagaaaattgttgtcttctataaaccacgtcaaatccaaatttgacgggatgtgaaaaagattttgtaaaatatcttgaatactgtatccccaccgttaactttttcaacccaatcataactgcaatctatatatagttctgattgctttcaccctgttatagtggatgtagaacactctatactaatcataataaatatagtaactatactcccaatctataagaaatttcaaaatttcaaaatcggttgggttcaagtttccatgcaggaattcgcaacatgaattaagctttgggatattttcaatttctggagtcatcttctggcatggactcatttcctttgaattaagtagaagtttatgtggtttaatgctttttttggggtttccaacaattcatctgagaactccacgtatttataagacattatttaaatcttgctcttctatttgtttatattcttcagttactccccttcatttttttaattcatttaatttgaaaaatactaaattcaattattcattaagcaagcaaaagatgtcatcgatgaatgtgctagtgtattccggacctggaacaaccaaaaattgtgtagaacaatgtgtgaaaactttcaggctcctattcactccttactattcggtttctacagcagatgaaagaatgcttgaaaatcaaccatgggaattaaaaacggcattgttagttattccaggtggtgcagatctacctatgtgcaaaactttcagaggaaagattaatgatcgtattaaatcttatgttagtaaaggtggtaaatatattgggatatgtgcaggtggttattactcatcttcaagatgtgaatttgaactaggaaatccaacaatggaagttagtggacctagagatttgaaattctttcctggaccatgtagaggttctgttgtgaaaggatttgattatggaactgaaaaaggtactagagcattggaaatctcagtgaatttaaatgaactaccaaatattgctccaaaagttcctgtttatgttaatggtggtggtttgtttgttgatgcacataaatatagaaatgtcaagattctagctacatatccagacgatattgatgtcaatgataatgtaggtggctcaaatgctgcagctgttttgtgtgaagttggaagaggtaaagccttactttttggatgccatcctgaatttgatcccgatactttagatgataattctgaagttccttcatttgcacaagttttgaaaactttaaaagcaactaataactccagaatagattttttaagatcttcattgaagaagttggaacttaaggttaatgaaaaagaaaatcatatgcctaatttaacgcctctatttctttgctctattgatggtgcatctggtggaaatttgataaagtcacttgaatcggaaataggttatcaaattcaaaatgttatggatgttggttctgataaatttgcaattaataaatcaatgaattatgtacacgaaaccgaaaatgtacgagctgttgaagatcctagtcttgctatcaaacaaattttcttgtgtgaaaatgaaacaccggacaaatatttaactccaaattttgatatcgaaaaatttaaaagatgcttgacggagttttatgagttatcaaatcaaaaaatgaatgaaaactcagtaggtaatacttttatgtatggtgaggttcttacatccacctctggtttgatggatagcaattttaaatttttgccattaattcctgacggttttacaatcactggtacaatccaacttttaggtaaaggtagatctggtaatcattgggtcaatcctaaaggtgttcttccagtgtcctttttactgaaaataccacaaagtatcactgcaaactcacctgtggtttttattcaatatttaggtagtatggcatatactcaggcgattttagagtatggtgagggatatgatgaacttcctgtcaaaattaagtggccaaatgacatttacataaaatatcctaagtatgttggagaaaacattaacaaagattctaaagaagttacgcatactaaaattggtggtattttggttaatacaaatgtattcaatggagtattctacttagtcctcggtgcaggtgttaatgtgagtaatgaagctccaacaacatcaatcaactcggtcattgatgctatgaatgaatactacgctaaaacaggtaaaaataaaagattgtctcatttagaagaagaaaaattattagccaaatttcttacaatattcaaccaaatgtttacaaagtttaaggttgatggattcactccattcttgaaagattactataagatgtggtttcattctaatcaaattgttacattaagtcataaaaatggtgcaaaggctcaagtctgtggtataacacctgactggggtatgctaatggcaaaagatctcaaaaccggaactatctatgaattacaaccagatggtaactcgtttgatatgtttaatggtttgatttctcaaaaacgttaaactaattaatcttgtataatatggcaaaacctttatatcattcctgaatctataatacttatataacatcttagtcattctctttaatccgtccattattaaatatttagtatatttggtagtttcatattgtctagatttaagtaactcaaattcatttgtctagtaattcttcaaaatcaatagtttttactttttaggtggctcgtcaaacatagaaaatactccaattttacctcttataatcattttattccaaaaaactacacacattactatatttacaggtaataacagctactttcaaagctcataaattctttagcaagctatagcacctactaatgcaaaaagttaatgttttttcaaacttttcatgacagttagattgttgtatatttgtaatatctcaaagtaacgccgcggagggcttaattgaattatagagtttttactcatgataactcttgaattttgttatcgaaagtccaagtataatggagcagttaaatgcgattaaactattataaaaaacaaaaacttaaacttttaaacgttaatttattactaaaaacagaagtatacacgatttccaagaaaagaagctaactaaatatgaaaaatatttggggtgtctatgaaaatgacaaaaactgatatcaactttaagattgattgttactatcagaagaattatgttgtggagaggttggggaatattgaggagatgtaggggagtattgaggagatgttggagagtactgtggagatgttggagaatattgaggtgaggttggggaatattgaggagacgtaggagaatattgaggtgatgtaggggagtactgtggtgaagttggggaatattgaggtgaagtaggagaatatgatggagaggttggtgagtattgtggtgatgtaggggaatatgatggagaagttggggaatattgtggagatgtcggtgagtatgaaggagaagttggtgaataagatggagaagttggtgagtaagatggagatgtaggggaatatgaaggagatgtaggagaatatgatggggaagttggtgagtaagatggagaagttggagaatatgatggggaggttggtgagtaagatggagaagttggagaatatgcaggtgaagttggtgaatatgcaggtgaagttggggaatacgctggagatgttggagagtatgcaggagatgtaggagaatatgcaggagatgtaggagagtatgatggagatgtaggaccataacttggagaagttggaccatagccagcaaatggtgaggtaggttggtaagcactcatggaaccaccatattcggtaaaaccaccagttctatcatcatttgaacctgcagtaattaatggagagaatgcaacattatcatcacccagagagatatcaattatatcatccttcaaattatcatcaccataaacagtcattgagccgttattttccttcttttcaaccttaacaccaacagatgattctgatggtaatacagataatttatcttcatctaagaaaacgtcaaaagaaccagtaccaaatggtgccatttgtcccaaaataatattttgtgaaacaccatcacatgtatctaattctgctgatgcacctgcatcaaataaaatttcaacagtttcttcgaaagaacatctcattaatgcaccagtatcatttctattgaaaccatgtctagaaattgcaattaaatgacccttatatgtcattaaatcaaccaataaagctaaatgtctataattaacataagaaccatcgaatgcaataacatttaaaatttctttatataatgcacttcttgcagcttcaataccaaaaacaaataaaacttcaacgaaagagttagaatatgttctagtagtatcaataccttcaacagatataacatcagctaaattaataccatcagtttcaagaacccattcttgtttcttagcgaaatctccatcttcatcaatatatgttttatcatacttcatcatgaaaactcttgaaataccactaacacctcttaaagtaatagattctaacatttgagcttctaatgcttttaataaaccatcttcagtttcttcttcttcttcatctaatgccttttcttctctaacaattctacatctgataactaatttatctgcattatcttcagaccaaataacaaaaagatcatcaccaaagttctccataatctttgcagcaacctgttgcatacttaattgtttatctaacatcttagctctatctaattctaatcttaaaagccatggtgattgtttatgaatattttcttcaaccttttcatctggaattgcaaaatatgcatcaacagtatcaatatcatcttcaataacagtagttcttggatctggatcataataaatttcagtacatgcagtaacatttttaagagatgtatgttctattgcagattgaatactctttgccttttcaatatctgtggcaacatcttcttctaaataaactgttaatgcaggagttttgaaattctttgcaacatttaaaatttcctttaatcttggaacacccaatgtaacattcttagatgagacaccggcataatggaaagtattcaaagtcatttgagtagcaggttcaccaatagattgcgcagcaacaacaccaaccatttcaccaggattaacaagggatctagaaaattgatgttcaattgtaccaacaacccactcaaatgcatctttattaagtctatattcttccaaaactcttcttgttgacagtttagatctaataagacattggaataatgatgttgaattttgctttgcttcagttaaacaaccaccatcacctctaacaactgtgaagtttttacatagattttgaacagttgtaacaatatcagaaatagttaaatcacttgctttataacgatcgacgtggaaaatttgttgtgcattttgaataattctacgaacattgacaggtaatggccaattattatcaccatttggaaaaacttcagttctcagatattctctatcctttaataattgttcatattcttcatctaaaaccttttgaagtttaatatcacccaagatttcgttaccatattcaatcatatcaggacgaattgacattttttcatccattaaatcaacacgatatttcttttcaaatgctttattagaaccaggaatagtatcaacagtttgtttttcaacagttgttgcatcaagaccatcttcaccataaatgaattgaataacgtcacctaaagaatttcttgtagtaccatcataatgaaccataatatcttctaaagcctttaacaaacgtctttgaatataaccggtttctgcagttttaacagcagtatcaatcaaaccttctctacccgccatagcatggaaaaagaattcttgtggtgtcaaacctctaagataggagttttcaacaaaacctttagattcagcagaataatcatcagttgtaaaatgtggtaatgaacgatcttggaaaccaaaattaatacgtttaccttcaacaatttgttgaccgacacaggcagacatttgagaaatattaatataagaacctttagaaccagcagtgaccatttgtttaacattatttgaattttttaatgatgtttcagcagatttacctgcagaatctctcgcttcatttaaaatttttgaaaccttttgttcaaaagattctcttaatgtcataccaggttcagcttctaataaattcttctgcgcatctttaataacatcttgaacttgatcttttgcttctttaattgtttcagtaattgttttcatagtttcaggatcagcaattgcatcaccaataccaatagagaaaccattatgaagtaaccaataattaacaactttttgaacattaccaaacattttagcacaaactgttggacccttttctctcattgtagtatgaattaaaccacctgcagatgcaccaatggttgatttattaacaacaccaaacatgatttcaccatcaagaattaacatacctgaatcttttggacatgataatggaccatctaatctttgtaagaaaataccctttggaatacataatgataaaatttgtttaccagtccataaaggctttggttttaaaattgcaggttgaggaatcacaccatcccaatttggaatccaataacataaattcataacttgatcatattcaataaatgagtctcttaatgtcatttttctaataccacataaagtatcttgaacaatacccataacaggtttattagattgtggagaaataatttgtaatggaactgcacaaagttcagataattcagctcttgtttcataagattgtggaacatgtaaattcatttcatcaccatcgaaatccgcattataaggagatgtaacagataaattcattctgaatgttgaatatggcataactttaactctatgacacatcatagacattttatgtaaagaaggttgacgattgaaaagaacaggatcattatccattaaatgacgttcaactttccaaccatattgaagttgaatatcacctgctcttttattaaatcttaaatcaattctatcaccattatctctaataacatattttgcaccaggatgttcatttggaccatttctaaccatttcagttaatttttgaatattatatggtgtaacaatttcaggatatgttaaagttttagcaattgatcttggaacaccaacttgatctaattcaagatttggatcaccagaaatgacagttctcgctgaaaaatcaactctcttacccattaaattacctcttaaacgaccttctttaccctttaaacgagctcttatagatttaattggtctaccactcttttgtaatgcttgaggttgacctgcaatatcattatccatataagttgcaatatgatattgtaataatgcctcaaattcactaataacgtgctgtggagaaccatccatctcgaatttttgaacatttatatttgcctttaaaatatcagctaatttataagttaaatcatcttcagatcttttagaatcagtaaacgcaacagatggtctaacaggtggaggtggaacaggtaaaacagtcaataacatccattcaggtcttgcccattcttcattaaaacccaatttttcacaatcttctgcagatatatgtctgaaaacatttaaaatatcagatgcagttatttgttttctttcaagattttcaatttcttcatcaacattagattttttccatgtaccccataattttaatccatctttacgaattgaaggttgtatactaccacaccctccacgtctatatcttggtggttcatcttcatcatcttcatcatcatctaatggtggatcaacatcacagaccattttagttttagataatgtccaaacagcattaaatcttttctttggatctctaattttaatagctgatgcaaattgtgaatttgtatgttcatctaataataatttaccacaattcatacaaacacattcacaaacttttttaatttttgctaagaaaccaatatgaaaaacaggtttagccaattctatatgaccaaaatgaccagggcattcttgcatatcttctgaacatgtttgacatctgaaatttctatcaattgaaccaagtcttggatcatttaaacccccttctcttggtttcatagttacgggatccataatttcagggtattcaattttggcaacggaaattgatctagcttcttctggagaaaataaaccaaattggacctattaaaaaaaaataaaaaatagtttagttagtatttaagttcgttattttaaaatggaatgggaaattcaataaagacatacttcttgcaccgtccttagaggcgcactggaataagcaaatctactcattttgtattgtatttagttataatagtagtaataatgtaatatatgcagttagttttctataagatttttttttgatatttgtataaattaattattatctttttttgatttttttggaatgtataatataagtttttaatttgaaaaatatggtacagtgatatgaaacaatgaattaagaattaagaattgaatttaaattaatttaaatttaaccttgaatttgaattagaaaaaaatttaattgcctgtgaatttagttatttgattatttataatcgagttattaatataattgtagattatttctaagtttatttaaattggaattgcaacgatcaaatgaatgagtgcaaagatttaaaatatttggaaataacttagatttgataatttataataatatttaagtgatataacttgatttattcttttaataataataagctaaaaagtattaatgatttattagtaaactttctttctctatgggtaaataatagattaaaagagatttaagattgaataaaatatttgtgatatcgtattataatataattgaaaattaacttaatttaattttaataatatacaaatggaataataatataattcaaactttaattaatcaatagtatgtgtaaaataaaacctttatgaaagaactttaatagtacacaaatggcaattaagatgtgctggattcttaaagtgaaataccaaactcaaataacaactatgttgttgtttgaactgtcgtttccatgttgaatgcatttcgccctcatgaaaaaaaatggttgaatttcttcataacaaaaacttatcgacacataaaattttatgacagagtcgatcgtcgcatacattatgcactattaaggttactttaataatatacaagtagtaatgtagaagtataaacaagtatacaagatggtatattcacaagttgagatagtttataactttgcaaagatatcatcaataaaactttcatcattatcatttttaatttccttattaggagtattttgttccatcatttcatcaatttttattctttcattaataacccaattaatttgaaataatactttcatcattgtagttttaaattcaccccaatcaccattactattagcgttattattactgttattttccttttcaataaacatatttaaatttaataaatgttttgtaaaatgtttccaattaccttcataatgtcttaatttttttgcttgtaattgcttatattttaatacttcaaataaaaattcggatatcattctatatttatctcttttaataatgcatttttagaagttgaattaacacttttattatccttattcagaaacatttcaattctatccactgttgccttcattgcagattcaacattcgattgtttcctagttttacgctttttaacacaacttgttaaaattggtgatccatcctcagatatttcattttcatttataattgttttaggatatccataattgaaaaacccagtatttgatgataaatcttcaaaattatcatcatatgatgaaaattgtattggatcaactgcactaaattctaatgattcttcaagtgttctcttcataccacgtttattcgatgtatcaatataagctaatggatcaattaatttgaattttctataatttaatgatttattattcttagatcttaactttttctctgaataatcataataatcatcactatcatcatcatcattattatcaaaatcatcatcatcattaatgatttcatcatcagtttctgaattagtttttcttaagttctttccattaattgaaccaatattgtgatcattatagtaatcattattatcataatcatcataaagttccttctctgatgaattataggaacgtgaattcataaatgcagattcaattgccttttgtcttaaatttttagatgatcccttaggatgataaaattttggagaaaattcatcattttcatttttagattttctagcctttgatttgataattttagtagtttttgaaactttaccactagttttggttttcttactattcttcttatttttcttaatattactattatcatcatggaaataagtatcatcatcattttgatcatcataattatcattattaaaatcattatcataatcattatcattatcaacgtcattataattatagctatcattatcattatcaatttcaactccaatttcattatcatttgcatttccatgtccatttgaatgagaattatcatcatcatcaattaaattatttgaatgaatacttgtaattaatgtattttgagattcttgtttaacaaaattcattcttaaatgtttcatttgagttgcaaattcaacttcttcacgtgtatcaaaatcgtttattagactaataattttttcatcatgtgaaggtaaagtccaatgaggtattaaattttttaaatcatacattgttggagaataaatcattgatttatgattaattactgataattcatttgctaaatcataatttgaattaattttttcattaattgaatttggaatttcaatattttcaatattaaaaggatttgataaaatacttgataatgataaatcagtttgatataaagtataaattaaccataaaaatttatcaactttttctgaagctttaaatttaggtctaagccaaatatcatttaataatgaaccagttgttgaaattttagaaattgaaggatcttgaatttcaaatgggaaaaaactttgaccaatatcatattcattttgacaaattaagaaaattattgaaactatattataattaaaagatttataattttgagattttttagcaattgaattaatgaaaaaattataagattttggtaaattatcagttaaatcattaacagattttaaaattgattttattctcggagtatcttgtaattgtttaatagttgacattgtataacttgtataatttttaagtaaatgagtaattgaagtatttggaggattatttgatataactcttggttgattataaatattacgtttaataatttcaggtgttaaattattttcatcgatattttcattatcattatctttactatgtttatccttattatgtttatccttattatcatctttagtatcatcatcatcatctttaatatcttctttaacattataataatctttaataatttggaaatgattaccaacttgtaaagagggtattgaatgataagttctaaattgagatttcatttcataatcaaaattaacagttgtatttaatctaccaatattaactaatagacaaacaattgcaaaatttaaagcataattaatatcaatcattaatcttgcctttaaaatttttgaaattttatttgattttaataaagttattaaatataattcaaagaaagttaatatatgaccattattttgtattaaatttttattttcatcaaaataataattaaaataagcaggccaatcgaatttattattattaatattttcaataaaaggatttttgaaaactcttttattatttaataataaattaattaaaaattcaaattgaatttcatttctccaataaggttcactatcatttttcttcatatgtcttgaacgatgattaattaataaattttggaaaattcttataccatcttgattcattaattttgcaccattttttatactaatttctatactattatgaatatttgttgaattgttattattatcttgatgattaacgatataatctttagcagttttattattatttttaatatttgtatttgaattagtatttgaatcactattattattgttattattattattaatatcatcatccctatcatttgattgtttaattaatagatcagttacagataatggaggtgaattatttaatgtactgttaccactaacaacattattattattattattaccaccagtaggattaagtaaatctgagagagaagccatagtgaatatattatgaatatatattatgctgtgtatagtagtatactatgtggtataagaaaagaaagggattaattaattaattaattaaagagggggaaatagaaatagaatggaaatagaaaacagaaatagaaaatagaaatacaagaatataaattgtaaatgagtgcagccattgatttaattaattatctaattgtagcataacctaataatacacttattaaattaaaatatcaatgcaattgttgaaaataaaataaaattgaccaaagaacggaagttgcgccctttcaatttcgccattgggggaaaatttcataattttcattattttattttcatattttatttcagtaatttgtttcagtaataattacgtgttgagccttgagccttttattttattttcttataaagagagttttccaattattacgtaatgtaataataagattacgtaatataaaaataccaacagacgcgactgtacaatacatttactaccattacgtaatacagaatgaaaaaaaaaataaatacgagaaggctcagttattattaaatcttatacttatataataatagagggaaagaaatttatctcaaattctgcaacaataactcacacgtgggaaaattataaggcaagtcattatttaaatttaattaattctttgttctttgtgatttttgcttcttttcattcccatttaatatactcatatacccaattaactacccccttcctaagcgtaattgttaattagaaaatatatattatacttaacacactttttatttcctatatctcatttcaatctcgtattatcacaccacacactctttctcattatcattaataacttaataaacaattaaatgctgtttggagttaaattacaaaacgaaatttattctccttggaaacaatattatatcgattatgatcaattgaaaagattattaaaggaaaatgttgttaatcaattagatttaaatacaatttggactgaaaaggatgaagctttattcgctgaaactttagataaagaattagaaaaagtttattctttccaagtttcaaaatataaatatttagattctgaaatttcaaaattagaattaaaatctgaaaattatttagaatctttagaaaataacaataaaaataatactaactcatttgatgcaattactttccaaaaaaatttagaagatttattatctttagctaatgaattggatcattttgcaagattaaattttactggatttattaaaattgttaaaaaacatgatagattacataaaggttattcagttaaagctttacttaatgttagaatgaaagatttacccttaaataatatctcagaagatacttctccttaccttttcagaatttcaactctttattcttttattagagatcaattaaattcaaatacaatctcttcatctttatcaaattcattaaaggaatcttttaataaattatctaattctggtaaattatcttcaactccaaatacaagtttacaaaataatggtattaatgattctcaatataaagttttgaaattttggattcatcctgataatttaatggaaattaaaacaactattttaagacatttacctgttttaatttataattcaaatattaatgatattgacgatgatgatgatgatgatgatgaaaattcaggtttggttgattcaacaattacttccctttatttcgataataaaaattttgaattatataataataaattattaaaacaactgaataaaactccttccttaagaattagatggaatggtaaattgaaacataattcagatttaattgttgaaaagaaaacttttgattatgatactggtaaatcagatgatgttaaattaactctaaaagaaaaatatatgaatgattttattttcccttcaaatgatgattcaaataataataataataataatgaaattgaaactaatttcgacgatttaaatgatagtgaaattatcaattatagaaataccttaaataaaaagaagaaaacttctaaaaaattaactcttgagaaattcactaaaaggttatcaaagaaaggtttttcaaaggaaagtattaattcttatactaaaagttttgaaactttacagaatttcattaattcaaatcatctggaacctgttttaagaactatttacactagaactgcatttcaaatgccaggtgatgatagagttagaattacaattgattctgatatattatttatcagagaagattcctttgatcaacaaagaccaatcagagatccaaatgaatggcatagaaaagatatcgattcatcaattgataatccttattctttattaagaagaggtgaatattcaaaattcccttattctgttatggaaatcaaaatttcctcatcaattatgaataacccttcttcaagaactcttaattggattaatgaactaactaattctcatttagttaaagaagttccaaatttctctaaatttattcaaggtatatctgcattcttcttagaagatgataatttagatattttaccattctggttacctgaattagaatgggatattagaaaaaatcctgaacaagcttatatggattcaaagaataaaaaattaaaagaaattgaacaagctggtgttttgaaaaatttgaagaaaaaaattggtaatgcagttaaaactcaaactgatacagctgatattcatttagatcaaataattgaattaaatgaaggtgatgatttagatgctgaatcttcagatgatgaaacttctttacctccttcactacaaggtaataataacaacaacaacaataataatataacttctaatagtattttaactccaccttcaagtggttattctgatagattaccattagttccagaatctaataaaagaaaacaaaatattactgatgttttaatgccagtttttcggttcatcaaaattagaaggttatgaatcagaggatgaagaatttgaactacctccaggtgttgttagaccaactcaattaattcgtcaatcaggtcctgttagagttgaagcaaaagtttggttagcaaatgaacgtacatttgttcgttggttacatgttacaactttattatcagctttaacttttacaatttattcaagtgttaaatcatctcatttccctcaattagcaactgatttagcttatatctattttgctttaacattatttagtggtgtttgggcttatgcaatttacaataaaagattagatttaattaaaatgcgtagtggtagacatttagatggtttatttggtcctttagtacttgcaggcgtattaattttaacacttgctttaggaattttttacaggtttgcaaaaatggaaagttaaagcaggtgtttcttcaataaatattttattagctgataatttgtcaaaatctattgaaaatgaagatttacacccattaactcgttgggctttaacaaaattattttcattatgttaaaattcaacttctaatatctactctttaattatctcttttgttcttaatattatattaattatcattatctatataattactctctaaaacaaatgtcgtttttttaaatatacaatcctcttttttgagacttctattaatacattctttaattatttattatcaacaatacctttaagtagatgtttcttgatatgcttaattctttcctcagttaataaatttttgttatattcattaaccacaaagtttgcactagatacagaatttattgaaatattagattgtctagatttttttgaacatcctgaaactcttctaataggattattcaaagttgcagtaagtaatggtgataatttatctaatttatcctcatcacttatcatcatcatcatcattaacgtccgcctcctcttcatcattaacgtccgcctcttcatcatcaacaacatcttcatcattatatagattatccatttgaatatcaggtatttcattattcatatccgcataacattcaacacaagttaaccaaatcttacatgcaattagaagattaaattcttcaattttaacaatatgttcaatatcatatatttgttccaaatttttccttaataatagtaacccatatgtaaatttattaactaatgtgatgtttctgacaaataaataatggataaatcattggtttcccacttatagtgttactattttctttcccaataggtaatgaataatagccggaactggaaataggatcatgaatataactagtagatcctaaatatttaataggatatcgtaggggtatttgtaaaatatctgcaattttggaaattattaaaccaatataacctattattgcatttaatctttcggattcctgttttgatatattcataagtttttgaattgttgatgttgaaactatcgagtaaggaatttcatttattgatagtcgatattgtggtattaatgatgatggatatgatgtattgaacaatgtgaatgaaaaattgttttcactttctttaattgggaaaatgtattgaataatcgatgcaactcttgatttttcaatattaataagctttttattgtttttaatatcaatttctaacttacatatttcctcttgtacatctgtttttatatcatctttagcatttttgatgtttgaattgattctatctttaatttcattcatttgtgatatcctttcctttaattgtttattatgaagtttacgcttttctaatattttagataattgatttatagaagtatttgtcttatttaaaagatactgattatttctaaaaccattattattttctaattctttgtctattttatttttcaatacttgcttggttatcaataaatcatgaatacatttactgtaattatttatcactctaatttgatcatatgtacaagaactcgcatgatatgccgtcatatcaactctttccattatggaatcaaaataaacagttttcaaatattttatagtttgagtaggtatactagtatttggtaaaatataataacaaccatcagtcatttgtaaaatcaatagatttttccttcctttaagtgttttcattatcaattcactatcattacctatgtttattagtaaagataacttaagatggtattgctttaataatttccatcgatcatttttgaattttgcaaaaagatttatagttgcagaattggagaatattcgtagttccagttcatcatctagttcaacgtcagagggaaaagtccggctaataaaatatggcttatctatattcaaaaaatcgtttaatgtatagaaagattcaactatttcgttatctttattatactgtaactccaattgtctttgtatttcaataggttgctttaataaactcttttcgtgggtcaaatcatttttacctttattactgatgaaggtatcttcactttcatcatcactgtttccagggaatgaatgttttaaatcataagttgattttccctttcttatcttatgcatactactagatcttgaaactttcttagtaacatggtttattatctctcctgtattatcatcttcattatcagtatcttcaaaactgatatttttagttgtcttagctctgtttatcgtctgattaccctttttcacattgggatcttgatgttcaatttcacagatattttggataattattgttttgatatgtcgtatctttaacagcctcggagatatggatgaattcaaagtgattgatgattcgtcattatccttcacatctgcaattcctcctctaaattgtggcaccgatgtcattacctcccaagtatgtctcctattataacaaccaattcaatagatataataatttactttaaagcaatgtctaaatcgagttactacccttattcggctaagttacccttttgggaggatcaaaaaagttctcaaatttgacatcaacaagaacctttctttataataaacctttaattaataatgattgattaattgtgaaggataaaaaggaagaaatcatatcgatcaaactagatgacttttatagtatcggtagctcatttttgtgaagtgcatgggccttcaatgattatgtgcacacaagtggtgaatgatccaaaagatttaccttcgttttattcaccgcaactaccggaatcacaattttgtcaatcttgtatgttccaaattccagatactgaggaaaattcacctgatacaagcagtacaataactaaaacaacaactgcaacaacgacaacgacagtctcctcatcaaatggtgaaaaatcagttgaaaacaatactaaaatacccaatgaaaaatcaacatcatcgtcttcggaatcagcaataccaaacggtgatatttcacaagaatcaatatcaaaagcttgtaccccgtcaaacctagaagaccaaatatccaatttatttaatctttcagataataaatctgatcataaaaagagattaatgactttaaagactgtatctaaacgaaataaagatacatttttcatatcaactcaataccctaccaatactgaaagatatgcatctctacgacagactattgtgcgagtgtttacagctgaaacaaatgcagatttaaggaaaccacttatgtttgggaactctaagcatggttattcaatggctctggtgttttccctaagtgataaaactgcaagaggttcagaacgtaaatatgcaataattgtaacttcaaattgggaaattgatttagtgaaaaattatgcatttatattaactaatcttaatcaaattgtaaaacacatattgattagtgcaaggaaagtacagaaagaaattgatctttatagcggtgaattaaataatactgatgtttatttaaggagatcagctggacaaccaaaggcaaagagtatggtacaaatattacaagatgataaatttttcgttaaacttcatatttgggcttcttttatgcttgatgcattagaggagaatagacatatatgatatgtacataaactatttttttgtagatgattaattattaaatttgttatattcaaagtttaaaataaagcaagaaaatttaaagaaaagatttcatagggattagttcacacagcttcagcataacctctaagatctaatgttaatattttcgaagaattaacatcttgatctctataaataccaaccaatgaatcacttctctcaaataacatatttttcaaactaataacaataaattgaaaatttggtcctctatgttttgtaatataattagcaattttatcaacattagcattatctaacgctgcatcaacttcatcaagaacaaaaaatggtgatggatgaaatgaatgaattgcaaataataatgccaatgcaccaatagtcttttcaccaccacttaaattttccatatctctaaaacgttttaatggaggcataatgtgatattttataccataagagaatggttcctcttcatcttctaaagttaaatatgcagatccacctaatggtgaacttcttgactgtgtcagttctttataaacttcatcaatattattagaaacgtgattaaatgctttcataaataaatcttgtctttcatctcttatattttcgaatttttcaacaatttccttctctgcaagtttagcttcattaaaatcggactcaacttgtctaaatttctcttgtgcatcttctaaatgttcacgagcatgtatatctggatgaatacttgctaattcctcagaaagttgttctattcttaatttacatttttcttctatatttttagctgaatattcaactttttcagatgtctcatcatcatcatcttcttcgttatcatcaacatccatttcatctccatcttcattttctataaatacacgatactcatcatccaatttagagtaattgatattcaaacgattaaacaaatcatcccattcttgacttaattcatcttgttctatattatcatcaatcaatggtaaattatctaaagatccagatcttaacggaattttaacattttccattttagcatcaactaaaagattctttttctttaactttaaagactctaattcctcttcaatattattgatttcctttttcgtttgtttgatttcactcttcaaattattaataatagtttccatatcagttgttttagataatagtttcttagccttttcattcagcttcttatatttttcctttgtttgatcaagttcagtttgtaatgattgtattttagattgaagctcatttaccttctgtaaaacttctttccaactttcataataattattcttatcttcaaccagtttctcaatatgtaacttatagtcatctaatctttcagtttcaaattttagtttgttttcttgtctttgaatttctttaacaaatttagaattttcatttgcttccttgattactcttgaactataagttgatttcatattctttgatatttttaaacgaatatttctcacagaatgatttataaattttattttgattgactgataattcattatttaacgactcaagcttcgtatcaatttcatttatttcttctttcacattatctattgcttcatcattttcatttagaactttattttcaaattctaattcagtatcaacatcacgtaattttctttcaatttcatcaatgtttttatttatttcaggtacttgagattccaacttatttatttcatcattcaaaacacgatctttaacgtcatcaggtatctttgaatggatttcaaaaattttcagttttaactcttccttacgttcatttaatgaacctaattctgatttatcccattttgtattgaaattttcaataccaccacctgtcattaaaccacttttatgaattaatgcgccatctaatgtaactaatttaacattaatatttctaccccaacgtaatgaagttgcaatttcgattgtatcacaaactaatgaattaccacaaacatattgaataacctctttcaaattctgatggataagtaattacatcaattattggctttgcactctctgataaattacgtaaatttgaatcaagtggttgaattttaatggtatttaatggtatgaatgatgcaacacctaatctttgttctttcatatattcaatacattcagttgctgttgataatgtatcaactataattgaatcaaaatttttacctaaaattgctgccagagcaacactatattttttctgttttggtttacaaatatcattcaataaacctctaacgttcgggaataatttttttaatattgaacatgtttctctaagttttttctctcttttattttctctttgtactgcattaatttcatttaatctcagaagaactgcttttaattcttcatttgaggcatattctttttccttaattgaagaacgtaatgaatctaatgaatttaattcttttctgaaatttttaattgatgattgtttagattttaattgattttcaagttgattaatttttgtttgataaatagatttttgagatttcaaatcatttactctagcattgattaataattgattagaacttaaagaatcaattttattattcaaagtgaatttatcttcatttaaatcatttacttcaaattccaaattacctgcaattgataaaaacttgtttcttaattcattatattctgtcaataattcaatatttgatgaaaatgaagaggttttattttcatcgttttcatcatcatcattttcttccatattagactcttgaaacaatttaaatgcatcatttaatttattgagaataattttcattatcttgaacaactttcaattgttcatcgctttcgagttctaaacgcttgattctttcttcgaattcatctgatttttcctttaattgtaaagcttcagattctaaaggtattaaactaactttaagagactttaagttaggattcatcattttcaattttagtttcatagtttttaatcgacatatgttcatcagattgtgtttgaacaaaatctttatattcattcatttttatttctagtgaatttgaaatatcatctaatacttcatttttttcattaagatctctattcaatttagcaccaattctttcattataatctaatttggataaatatttagtaatcattaaggttttctaactttttagttttttcaacaaattgatcagattctaaacattttagtttcaattttttaatatcatcctttagattccttcttaatgaatttttcaatgatgtttcatcatgacatttttccttttcatcacgtaaagtttcatattgcttcttcaaattaattgagccactaatattttcaatcatattggttaaatctaatggagattgggatgcaactttttcaacatcaccttggaaaactaagaaatttttggcctttataagtatattctcctcttttaagatttgtaaatattgattaacagaaacatttacaccattcacagaaaaagaacttgaaccatttccattaatcgatcttttcaaatttaatatatccttattatccttctcataaattgcaataacatatgcttgattatcatcattttgtgaatcattatcaatttcattatcactatcaatatcattttcatcattactatccatatcattaccaccttcaatatcatcttcatcattgatacggccacgatagatcaatgactttatattacgtgaacgtaattgatttgatctaacacctaacacgaaagaaattgcatccatcatattactcttacctgacccatttggtccaataattgaagtaaaagcagcagtaccaaacccaacttgagtcttacccttgtatgatttgaaattacacagttccagtccaacaagtcttcccattatatccttttgccacaggaaacactaaagaaaaaggtgtacaaaatgtacacaaaatgccattccagctgagcattttgattgtaaatttaattttacgcgtcttccttcatgtgacctcttactaatgacatcctcttctttaactagacaatatcgatggtatgtatactgagtgtatatcatgttggacattgtatgaacaagcagtactaacaatgaacagagtcaaccattaacttccgtttcatattgtataggttcattagctttagttggttcaactatggcttatattaagaaaggttcaattccatccttattatcaggtggtttagtttcaattatttattttattggtggtgcattaactaatgcaaatcgtaaaaacggtttatacgtttcattagctgcatcagttattttattattagctggtattggaagatgttttgcaacaagtttccaaaaagccgttcctttagtattatcaggtcttggtcttttatctacactttactttggttcttttatcgtataaattaattagtttttatttatttattaatagattttaaattttaaattttaaataataaataatattatattaaaaagatattaattataaacgggtattactatatactaaataggggaatgtgaaatgcaaaattcataaaataatcataattagtcaacttcttcgactgaaggaccagaaggagcatcaccagcagaacctgcacctggagcaccagcacctggaacaccaccaggagcaccacctgctgcatataatttttgcataattggatttgcatcttgttcaatttcctttaatctatcttcaaattcttcagttgttgcagtttgattagcatctaaccattcaataacttcattacattttgataataatttttctttatcttctgcaccaactttttcttcaaattgtgcttcatttgcagaattctttaatgaataagcatatgattctaattgattcttagcagcaattctcttagcttccttttcatcttcatccttgaatttttcagcttcagcaaccattctttcgatatcttcttgtgataatctacccttatcattagtaatagtaatcttttgagtcttaccagtacctttttctaatgctgaaacatttaagataccattagcatcaatatcaaaagtaacttcaatttgtggaacacctcttggagctggtggaatacctgataattcgaatttacctaaaatattgttatcctttgtctttgctctttcaccttcgaaaacttgaattaagacacctggttgattatctgcataagttgagaaagtttctgattttttacatgggatagttgaatttcttggaattaatttagtcataacaccacctgcagtttcaatacctaaagataatggagtaacatctaataataataaatcttgagtcttttgatgattgatcaccagttaagatagcagcttgaacagcagcaccataagcaacagcttcatcaggattaattgacttatttggttctttaccattgaaataatcagaaactaatttttgaacttttggaattctagttgaaccaccaacaaggacaatttcttcaattgatgatttatctaatttagcatcttttaaaactttttcaacaggatctaaagttgatctaaataaatcagcacataattcttcaaatcttgctcttagtaattgaactatagaaatcattaccttcaaataatgaatcaatttcaatagttgtttgagctgatgaagataaagttctctttgctctttcacatgcagttcttaatcttcttaaagctctttgattaccagttaaatcttttttaaattttctcttaaattcatttgcaaaatgattaactaatctattatcgaaatcttcaccacctaaatgagtatcaccagcagttgccttaacttcgaaaataccttcatcaattgataataaagagacatcgaaagtaccaccacctaaatcaaagattaagatattatgttcacctttaccagaatcttttttatctaaaccataagcaattgcagcagcagttggttcattaataattcttaaaacatttaaaccagcaattgcaccagcatctttagttgcttgtctttgagaatcattaaaataagcaggaacagtaacaactgcatcattaactttagtaccaagataaccttcagcagtttccttcattttagataaaaccattgaagaaatttcttcaggagtgaaaactttagtttcacccttatattcaacttgaattttaggtttaccagattcatcaataatcttaaatggaaatgtttcatatcagtttgaacttctggatctgcaaattttctaccaataagtctctttgcatcaaagacagtattagcaggattcattgcagcttgatttttagcagcttcaccaattaatctttcagtatcagtgaaagcaacgaaagatggagtagttctattaccttgatcatttgcaataatttcaactctatcatttgcgaaaatgagcaacacatgaataagttgtacctaaatcaataccgacagcttttgacatatttttatttttatttttttaaactaataaattaactatttgttttgtgtagaaagaagaaaagttaaaagaataaatagaaataggaataaagaggaaggaattgaaattttgaaataaagcagaaacagtgttcttttataatgatatttgccacaagagagggattgacaattataccataaataattcatattccatcataccataatagatgaaatgccaactccgaaacaaccgggagtttctcgaaacttccatctcacttctctctgatgtaatcaatatgaaataatgggggatttttcacttactatgggaaaattcgagaaccttctcttgcactgccgctttgtccaatcactgcgccactcaaatgtttgaatttcttcaactgcgccgcgtggctctcattatctaattgcaccgccgctttatgaatatcatcaggtgttaacttgtgtattattagtgatattactattactactactatctttacttctcttattgtttaatgccctttccacaatttcaccaatgaaaactttacctataccaccaagtaatttagcaaaatcatttgatggttgaactgtattacttatttgtgttattaatttcttaattgatccactatttaaatttgatctacgaaatgtttcatatctactattttgtattgaatccatctcacctaataataattgtcttgattgattattattaagtgaaaatgcttcctcatatattgatgatgtggtactactattatcagattcatcattatcatctgaatttgaatcttcctcagaatctatcttcttcctcagaattatcatcatcatcatcctcattatcatcttcttcagaattgtcatctgaatcttcattagactcttcttcattatcttcaccttcaccttctgatctatcttcatctgatccctctctcactactttttctccttctccctctctttcatactgtcttctcttgttagtcaattcatcttctccatatactatacttctcttcatattactaaccattaatctatgtctatatcctatacttaacaccaccgtaaacacactctgatgtaaactactctccagattaaataaagataatttttcacttaacactatacgcgcacaacatccgtttctgttgtccaggaaaattatatctttttggaaaatatcgaaatttaccaaatttacaactttattatagattctcttatttgaataatgaaaacttgcagaatttgtagaggtgaaggtacaccagaccaaccactttttcatccctgtaaatgtcgtggttcaatcaaatatattcatcaagattgtcttcaattttggcttgatcattcaagaaaagatacttgtgatatttgtaatacaaaatttaattttaaagttatctatagtgatgattcaatttctaaaaaattatcattttggttattattgaaaaacttattctctcaatttatgcattggcaaaattatttaactaaaactttattattcggtttatgtgtcggattttatttaccagtttcaattgttgcaattgattcattttatgattttttagctggtatacaaaaatttaaatcaggtgtattagattcaatacttttcaataataaaatctccgatgatttatcatttactgaaaaattagttatattacaaagagatacaattccaaaaggtgtaacaattgcaattatctatggtgctattgttttagctattattttaatccaaaataatttagcaggtgatccgggtgttcaaaagattattaataaaagaataggtttagaaccaaacagacaaaaattgctcttaagtgcattaattgaaaagaaaaaacatttaattcttcgaagaaagagtgatattttttatcaattgagacttgaaaacgaattatatgataaatcagtagaggaagatggattatcagcacaaaaaagttgctaaattagatcttcagtctattcttgagctacaaaagttattagttgaaagaattaacaaattaaccccaaatcaatacgaaaaattgaaaagtatatgtactgaacatccagaaactttaaatgaaattccatatgatgtttctaaacacgaaaggtcttttattgttattggagtagcttatttagatagaaagttcagattggaattcatgtgcaagccaccagctgaagaatcattaattgtcacagaggaagaatttaaacaatttttaaaagatatatcagatgcaacttcacatacagcaaatgatcccccaaatgtaccagaaccagaaccagcaccagcacctcctcctgctcgtggtttcaatcatattcataataatcctgatgttattgatgtagatgaacagcttagagatgatgctatagatagattattaaacgttataaatggtccacgtttcttagataatattaacgaacaagatgacagagatgaagaggaagatcaaagacctcatcttagagatgaagatcaaccaaattgggatcaattaagagctgatgtcgataatattaatgatcctacagcccgtctagcagctcaatttcttgaagctgcaactggaccagccataccatttgcagaagcaatggcaatggcaaatgaagatgaagcagctgctgcacctgcacctgcacataatgctaatgctgatccctttgccaatgtcaatcgtattaatgatgatatcgagttaccaccattgagacctcatgaacgtgaatttttcagaaatattgtcaatccagaaaacgttcgtcgtcaaccacgtccacaatttcgtcaacctcctcaagctgttcaagatcctccaatgccaattattgatgaagaacctgaacctttttggaatggtccattatcaattaaattgatcctaactgcaactgtacttgttaaatcagttactttatttgtcttattcttacttaaatgtttaccttatgcattgggtaaacaaacgatctacacattttacactatcttacattatttcttccctaatatgtcactcaatcatcaaaatactttccaatctgattataaaccactgaatttatttgttgatttcatatggcgtaatattattgatacagttttatcaactatttcaaatgttacaaataaaactctttctgataatttaagtgaaaagatcagtattcaattattaggtattggaactgttgcattctcagtttattgtattatgaaatatttagaattaaaatcttcacagcttaaaccattatcaggtaattcaagatcattatacatcatcttattacaaatgaaaaatactttcaaggttttcacattaatgttcattgaatggtgcctattcccattaatttgtggtattttagttgaatttgcgttagttccaattttcaatgaagatttatacaattatcatctcgaaccaagattatttggattcctatcagtcattccaacttggttcttaggtactttctttatgtatttctttgcttcatatgtttcaatgattagatcaaagattttaagaactggtgttttgttctttattagaccttctgatgatccaaatattcaacttgttcatgatgcaattatgagaccttttggtttaaggttttcaagaattttattatctcttggtgtttatgcaatttacattctttgtgaattcattttagtctcttggtcaatcagattattctcaccaattgcaattttacctttccattctaatttcagctatgaaaaattagcttatgttggattgatcatttgtgcagattttatgaagaaaccacttaatatttactggaaatatatttttgttaagtgttgttcattattgagactttcctcatttttactgaatgaagatcatgcaaatgaaagaggtaagattgtctacaaatcattttttgcaagattcaactcaaaatctccaaactataataatcctgttgcatattctgaaactaaggaatatttcagttcacatcccgatgaaacttgttgttttgtacctgatggtaattacgtaagagcaccagatgatgatcatgttgcacgtaattttgtcagaactttgtttgttgcagttacaaaatcagatcaggttattagaggaaacaccagcattacctgatgatgaagaaaaaattaacccatatggcgatattgatccatttgatgttaatacttatacaattgtttacagaccacctcaatttaaaccaagattattcttattatttgcatgtttatggttagcctcaatggttttcacatttggtatttacttatcaaatattattattggtaagacaatttttaaaattacaacattagaatcagttttctcattaccttctgaatactataagattgatgtttacacgttatcatttaactatgttgttattatcacaattgaattttctcattgatattgttcaaagacaaatgcaagcaactaacgattcacctgaagcatctaaattaatttcaatgaaaaagattgtacgttcaatgtatttgaatattagaaatactattaccgaattttttaatacatttgcaatgcgtgttattgttagacacgctgcatataatttcacaattataatctatattggtcttgcaattcaaccagtttttaatccacatttaattgaacctattcgtattggtgctttgtctatgatcattttcacatttgtatctctgatcagctcattcctattttcgaatgctaaatcaatcaaaattttccgttatattacagtttttacaattgttttacgtttgattttcataacattctcaccagccccacagtttactaacttaaaaccagagtttattgaagaattacaaaaattaaacactgttgaagaaattattaacttgtcattgaaaaataaaataactccagatccattgattattcaatctgttggaaatactttgttaccaccatttctaagacctgctattaaattcttcatgttaagtgaatttacaggtgttgaagcatggatctatattacggtatggtttacagctgcagcgttcattgctgtatcatctgccattaaattatggtcaaaattcgttgaactaactaaacaaatttattttgataatatgaaaggttttagttaatactgaaggtaatgacgatgatgatgacgagtaaagatgtttgtttttcattaaattatattataataaatctataaaatcgataataatatatactccacatataatagttctgtataaagttaatcctcaactaatggatcataattatcatttgcaggatgaataataacatcatttaaatcatcagttttttcaatagtcaatccttcctcattagctatatgtaacatacaaataaagaaaaatgatgttgaaagttctgatttttcattaccctggtatttagtgtatgtatctttaacaatacttgataattttaactctttttcatgatttgccttggtcaaatcttcatgctcaacatgttgtttagtaacatcccataaattttgtttaagtaatctaatattaatacgtttagattttttattatattgaatactattcttataccacgcaggtttgcctacaaatggaactgtttcattctttatttcatttgttgatattttagcatcaaattcatatccacctggatcattatcaattccaaaatcatcaggtacattatcttctggtaaatcagttggtatattcatcttcattaggtttatccataacatcataaaggaaatctgcaacatcttcatcaatttcaggttcattatcatctctaatatgattgtttttactaccatctattttatcattatattttctagcccagaaatcacgatctgcaatgatttcacttttagatattgtatggtgtttactgaaaatatttcgaaatttacgtttcggttttaataatgatgtaactaatctttcagaattccaaactttcatatcaggtatagttgtctcctcaacacgaatctcttcagaattaataagtttaatatttttattgggtttcttaaataaaacttgagtgtcagtttcaggtgaatcgttcataaaatcaatcacatattcatttttattttgtttagctctttttttggcaagtgctttttcttcccttaattttgctgcttcagacccaccttcaagatcttcttcattatcaaaaatagctgtaggtgcagtattgttctgtttagcattaaaagcacgaattttccaatgagatttacttcttctatttgatattttatccaatgccgacatcatttccttttcacgtttttccatttcttccattgatataggatccactggtttaatattttcatcattatagttctcatttccatcatcaaacatcatttcatcattaggattcaatgaatatggtggcggagaattaccagtttgaatattttgtgatatatcataattagtattttcttctaaaataccatcatcattaccatcattaaaatcaaaattatcaatattataatcataattaagatttgcaacttcttcatatctttcatttgctaatttatctcgttcttccatctttttagccatttctgtaagataagctttaccatattccatatctgtgatacataatttaatactttgaatttcactagagatttttgttccactaagttcggatgcatcaaacttactcttatatgtatttatcaatggtaatacaactgcatcatcttcgaatttaattacatcatcattatcgtttgtatcaacattcattaagccatcatcatcatcttcttcctttttaacagtttcaatgtcatcttcactttcttcatctgacttctcattttcaagatctatataatttttacttgatatcacagtatcatcgacgaccacacgagaatctttcgatattcttaaagcatttaataataaagattttgcacctccctcatcaaagtctgaaagcattttacggaaaactggatcaatacttgaatgttcaagttgtttatcagtaattttaatcttatccattgtagtaagtgaacttttattttcttttttattaattttcttcttctttgttggttcataatctccatcacccttattatcatcatcatcgtcttcatcatttcttaattttcttaaagtatcctttttagcatttaatgataataattgcagcaatgaattagtttcatcagcaaccgcgtcaactcttttagatataactttagtacaaccatctaatgttgtacttgccgtttgaaaattaattgatacaccatcatcacttctcagcatattcatatcataaaaatattcaatgagatgaacattccaagtattaacattcgttattttattatttgttgccattttaagagaatctacaaaatcttctgtaccaaactgcccaccataatcatcgtcgtcatcatcatctaaattgccatcccgacttccattaactccatcatctaataaactaggtctatcatcacctatactaacacttctcgtattgttgcggctcatacttttatttggaagtgatttctttttcccatttgcagggcttgagaaccttggtctctgtcttttcaaagtagttcccgtcatcaataatgtaatatagagttggataccttatccccgttgtccaatacctctgtatctacctgatcaatcctttgttgttatagaaatacgtaatagcaataataaggaaataccaaaaattctcatccttcctgaaacgaaacgaaacaccatttttccatcaagtgcgaaatctaccactctttgttttcaatgtaattagggtattagtatggtggttgatcacttcaaatatgtgctgttcttcttctgttttgctttatttgtacctttacaatctatataaactaacaaggtatgtccgctgaagacgaatttgcatctgctgaaaatattaaggcaattttcacaagattacagaaaaaaccagccaataaacaatgttttgattgtaatgctaaaaatccaacttggacttcaatcccattcggtatattcgtttgtttacaatgtagtgcaaatcatagaaacatgggtgttcatatatcatttgttaaatcttcaaccctggataccaaatggaccaataaacaattaagaaatatgaaatgtggtggtaatgataaatttaaagattatatcattaaaaatggtggttcttcaatgttaaatagggaaaagaaggaaatttatgattctcaagttggtcgtaattataaggaaaaattagaagaaagagcatcaaatgatttaaagagacatccaaatattattgaatgggatgaaggtgatattgaaacccctgatgaaagtgataatgcatcatcaggtaatgatgatttcttctctaaatgggataaaccaactaatactccttctccattaggctcaagaccattaacaccattgaataatagctctacaagtttaaataaagttgaaagtaacaatagtaccactgttaaggcaacccctgttagaagagttgttaataaaactactacttcaagtaaagttaatccattaactaaaaagagtattttaagttctaattccagaaagaataaagttgcaataaagaaagtttcagccgatgaagttgattttgatgaatttgaaaaagaagcaaagagagaggaacaagaagttaaaagtttaggttataatccaaatgaagattcaagtgtaaatactaaaactccaaatcttggtccaaaaacacaaacttcaacacctgcatcaattttcaataaaccagcaacaactgaaaaatcaaattctatattaggatcatctaaaaataatgaaactaagaaaaatgaagttgaaagtacgagacaaacttttgcaaaattaggttttggtatgactgcaaataatgcagctgaaattaatgcacaaaataattcacaatcaaagaaatataaagaagtagaatacaagggtgaagttgcagctagatttggtaatcaaaagggtatatcctcagatcaattttatggtactggtaattatgatgaagctaaagcagcagaagctagaagtaaattacaatcattctccaattcacaatctatttcatcatctgattattatggtgaagatgatgtttcacaattcagaaataataataataacggtggtgatattgaacaacaagttttacaatttgctgaaaaatatatgggtgatgatcttactgttcttaaagatgcattcgaacaaggtgcagagaaattaggtggttatcttcgtgatgtactcagaaactaaacctcttattctaagttgactatttaaattcccctgtataattcttattttataagacaatttttattagctatattgattgtaatgtagagtatatcgatgatatatgagtatcaaatttaatattaatagcagagacaataggcctaattaaagattgaaaaatcatgctattcttttatacttaggatgcggttattattattatatttttcaacgtttcttagtctaattaagtgacacattttcttttcttttgattgaacaaatactaacaaaacaagaatgtctgaaacagtagcagtcataggtgctggattagttgggtcattaatgaccttaggtcttgcacatagaggatataatgtaacattaattgatatgagaccagatccacgtaaaactagtaataaaagtgaaaagaatttaagatcaattaatttagcagttagtgatagaggtattagagcattagaatttgttgataaagaaatgagtgaacgtgtattaaaggatattataccaatgcatggtcgtatgattcatacattagatggtaaacaagaaagtcaaatttatggattattcggtgaacatattaattcaattgatagaggtaaacttaatgaacatttactagatgaaattgatttatttaatgaaaatagtgaaaattcaaataaaattcaatgtattttcaatcataaagttgcaggattatcatttaatacaagttttgctaagattaagttaattaatggtgatgataaagataatgataatgaaattgaaaaaaactttcgatttcataattggtgcagatggatcatattctaatataagatatcaaatacaaaaatatatacgtatgaattatcaacaagaatatattgataaatgttatttagaattatacattccgccaggagagaatggttcatttttaattgatccaaatcatttacatatttggccacgtaaagaatttatgttaattgcattagctaatgaagatggatcatttacatcaacattttttggaccatggaaattaactgaatcactgaataagagagaattaattgaaccattttttaatgataatttcccagatgcagttaaactaattggtatggataatattgttagagtatttaaggaaaatcctaaaggtgcattaatgcaagttacatgtaataaatataacttattcagataaggcaataattattggagatgcgtcacattcaatggttccattttatggacaaggtatgaattgtggatttgaagatgtacgtgttttacttgaattattagataaatccactacaagagaggttgcatttgattcatatactgagaagtagacatgaggatcttaaggcaattttaaaattagcaattgataattataatgaaatgtcaactaaagttcatatcatcagcatatttattccgtaagacattagattcattattaggtaaattattaccaaaatattggattccattatatacaatggtttcatttagaggtgatataccatatagtgaatgtattcgtcgtgaaaagagacaacaaactattttaaaaattgttgaaactagtttaattggaatgtgtgcaattgcaggatggtggaaataccgtaagtcaacctgaactgtgtgtttataataatgtgtatttaatgaaacgattatactgtaatattagaatcacccggtatcggaagtgctaattgttaagcaatgtaaacatgacttcaaaatataggatgatatgtaaacataacaacatccaaacaaagtcagtcatcgtaatatcacagcctccctttcttcatagcaagactaagattaagagtaataataacaattccttaaagaaacgatagttaaaacagtagttaaagtagttaaaataagaaataagtgaaaaactccgacaggtgaaaaattaaatgtcgccggtttcctaatcaggcaatacacccaccggccctgtaacggaattatttaaaattttccaactagtgagtaattgaaattcagtcattggacattcattaccttagggccttatgtagaagtggttcaactttctattttatttgaattattaatatttgtatttaaacttgtctattttctcttatttctgataatagagaattgatatcatttttgatcttattatcaatcaaagtcaattaatttaaaatgtcaacactttacgataaagttttcaaggaccatgttgtccatactgatgaatcaggttcatgtttaatttatattgatagacatttagttcatgaagttacatctcctcaagcttttgaaggtttaaaaaatgctaatagacaagttagaagaccagattgtacattagttacagttgatcataatattccaacaattacaagaaaaaattttaaatcagtttcaacttttattgatcaagaagattcaagactccaagttgaaacccttgaacaaaatgttaaagattttaatttagcttattttggtatgacagatgatagacaaggtattgttcacgttgttggtccagaacaaggttttacacttcctggtacaactgttgtctgtggtgattctcatacttcaactcatggtgctttcggtgctttagctttcggtattggtacttctgaagttgaacatgtcttagcaactcaaactttaattcaagcaaaatctaaaaatatgcttattagaatagatggtgatttaaatccaggtattacttctaaagatttagtcttacactgtgattggtgtaattggtactgctggtggtaccggttgtgttattgaatttgctggtaaggcaattcagagatttaagtatggaagctagaatgtctatctgtaatatggctattgaagcaggtgctagagctggtatgattgcaccagatcaaactacttttgattatttaaagggtagaccattatgtccaactggtgatgaatgggaaaaagctgttaaatattggtcaactttatattctgatgaaaatgcagtattcgataaaactgttataattgattcaaatgatattgtaccaactattacttggggtaattctcctcaagatgctttaccaattactgctaaagttccagatccaaatgattttgaagatccaattgctaaaagtggtgttgaagctgctttagattatatgggtttaaaggctaatactccattacaagaaatcccaattgataaagttttcattggttcatgtactaattcacgtattgaagatttgagagaagctgctaaagttgtttatggtcataaaattgctgataatattaaattagcattagttgttccaggttcaggtttagttaaaaaacaagcagaaagtgaaggtttagataaaatttttgaaaatgcaggttttgaatggagagaagctggttgttcaatgtgtttaggtatgaacccagatattttagatcctcatgaaagatgtgcttcaacttctaacagaaatttccgtggtagacaaggtgcattatcaagaactcatttaatgtctccagctatggctgctgctgctggtattgttggtcattttactgatattagaaatttcccatataaggaaaataaggatgcaccaaagattcaattaggtactgaagaagaagataaaaaattacaagatgctgtctatgaacatgaaaagactaaatacccagaaggtgaaactgaagctgaaaaagttaaagatgaaattttagatatcccaccaaaatcaaataaatcaattgattcaaaatcaattggtatggaaaaattcactgttttaacatcagttgcagctccaatggaaaaggcaaatattgatactgatgcaattattccaaaacaattcttgaaaactattaaaagaactggtttaagtaaaggtttattctatgaagctagatttacaaaagattcaaatggtaatgatgttccaactgattttgttcttaatgttgcaccattcaataaggcaaatataatttgttgtagtggtgacaattttggttgtggttcatcaagagaacatgcaccatgggcattaaaagattttggtattaaatcaattattgcaccttcatttggtgatattttctataataactcatttaaaaatggtttattaccaattagagtcgatcaagaaattattaaagaaaaaattttaccacttgcttccgctggtaaggaaaataacggttgatttagttgaacaaaaaattaaaggtccaaatggtgaaattttagttgatcatttcgatgttgaaccatttagaaaacattgtttaattaatggtctggatgatattggaattactttaactaaatctgaatacattgataaatttgaaaagaacagaaaggatgttttctcatttattgaaaatggtagtgcaaagatcatcccagttaaaggtaccaaaaaatcaccatatggtaatactgctcaagaatggtaagttagtcaactccaattaatttatatctaatatctaaattattcatataaaacttctatatattattttaatgtacaaaactttttttaggaaactatttatgaataataatatcttcatagtcattttccatctctaatgttaatccttgttcatttgctaaatgaagtaaacaaataaaacagaaacttgtagatagatctttcttaatattttcattgtatttagttgacattatttctacaactttagtaaatttcattgtatctttattttctaagtcattattattgtctaaaatattatcagaatttattaaagttttagttggggtattaagtgtcatttgattctgcttcatctttattatccttttcattctcattttgtgtttcattatcctcattaaaatgatgatgcagatctctttttcttactgattgatatttcttctattgatgtccaaatattttgtttaagtaatttaacatcaactcttttagatcttttagcataattgatcaaacctcctttattacttctttgtgtgaattgtgattgtgttctaaactcagttggtgtatccgtgttatcatcattatttaacggagcatcaaaaccttcaataccattaggatcaaaatcttcaaatactggtaaatcatcattattgaatatcatgtaagatactattttcatgagtagtattattagtagtgtttagtctgtggattatcattcttataagtttcagcaaaatattccggaccagctggaatattctccttctctttttcttcataagttctcagtctatttggtaataatacagaattcattgttaattgatttggttttaatgataaaaatgctaagagttttgcggaaaacttcaaatcaccatcaagaacatgtttacctgaattacgttccttttcagcttaacatgatttgtgacagataatctgaagactcaaataatggtatatcttcatctaaatcaaaatcgtcatctttcatgtcatcatctgacataaaatcaattaatttatgtgtatcagtacgagctggcttatattttttagttttcgactttttcgaaacttttagttgcatcactatcattttcatcaccatcattatcaccatcatcattcgtactcaaagctttcatcaactttgcatttcttttcagtcttgtaattttccaataaacatccggtcgtgatccaatatcatcatatttattaatataatccatttcaacttcatctaatctattctgtgcaaatacatcatttggttttttattcaaaggtggtaagtttttacgtattcgtatggtaattatcattatcatcttgttcatcaccgaaaacgttaccaagtgtgaaaattatattgagaatcatcagaattttcaactccatccataaatagagaatattgagttcttttggaagtatttgatacattatcttgtattatatcatcattagtagtgtttgcataagcatcaaattcaaaatctggttgatcatgatcattaatatgttctaggaaaggattatcattcagaggaggtatttgagagtcagattgtaaatttgcattatattgaggattaagaaaataatgttgatttataatttcattttctaccattgtaacatcaacattttctaatttttgcattaatgaagaagcatctttcaaacctttcgatatgttatctaactcagccagggatggacagactttcaaactattatttgaaaaatcaaaatttgtaatttttgattttaaattttcaaagaggtcaccttgaagtacgttttcctcagataggttggtcaatccaacagttggtttatcctcatgtgcaatatcaaaaactactttactttcatttgatacacgtaaaatattatttaataaacttttagcaccaccttcgtcgaaatcagccaatgcatttttaaaaactggatctgtagttgcaagaaaaaagtcatccttcactttaatagaattgaaagaagatgctaaaaatttagattttttcacttttctagatctaggtcgaccttcatgatcaggatcatcagcaatatcttcttcattgtcatcttcttcatccccatctccatcttcattatcattattatttccattatttgctgtactattagtattgttatttgcactaattgcattattaattgatttcttagattgaatatttaaagttgataataaagtacttgtatccttaacagctgaatcaactctatgagaataaattttcatacaaccatctaaagtagttgaagctttttgaaaatctacactattaccatcatttgattttaaaactgaaaaatcatggaaataatcaattaatgcaaaattccaagaattttcaatattaattttattatcagttgccattctaatccataattcaaaattttcatttgatacaggaccaatatcaacatctatatccatactggtatcttgaccagtaattgggatcattgttattgtattttgggatccagaaagattataaaaaacacgaaatcaaactcaaaattaataataaaataatacaaattataataaaatataaacaattgcccaaaagggtaaacatcgaagaaatttaaaatttgtgattcatgtgtaaacaagtttttgttatgcatcatctgaaaaacaaaaagcttaaatttccgaaaataaaagatgaataccatgaaaattccgaaagctaaacactattacgtaatcaaagaaaaaaagggaatttatgttaaaaaacgtatcaattaccgcattcggtaaatgaatattagatggcggctcatcacttttaaaaacagtctttaagaaattctgaaaattatttttgccaccatttaacaaagggatacatcaatgagatttaagttacagagttttaaggctcagtgataaagattgttttgtatttctatttttattttattatcatctttctttaattactttcatttcttacgggtacttataactatacaatatggatagaaaaggacaagaaatagtcaaatttttacttgattggcattatttattaactgaaccaccagttgacggttcaatacctgaaatttatttttgttttgtttgttcagtttatagtaagggtaaggataaagtttcttggttacaatttatgaaatatatgcgtatgattgataaattatgtaatggtaatacacttgtttgtacacctcaaaatgctttacaacaacattatgatgatccattttcgtgttttgataaaattacttatattaatagattatcacttgccttattattaagaacttctcaatcaatggcatttacaaatactaattcaaataataataaatctttaaataataataataataataataataataataaattacctgatttaatccaagcagatgatgaggaatcaattaaatcttcaatttcagatgatttaccaacaactcctcgttcaaattcaatttctccatctccaccttcaagtgcaggttccggtgaaggcccaggctcaggctcagagagttatgaaattggaatcaattatgcaaatacagttattgaaattgatgattcagttattaatgaaaactatgaaagaaaatcattagataaagttcaatataatgatatacccaaaaataaggaagataaattaaaatatgttttaaatttaattgaacctgagaaaccaaatatttcagataatgatatttatcctattaaagttataacaaataagaaattaattccaaaatcaattgatgatacttatacattaacaactaaatcaaatagattagaacaattagaatatttattagaaactccatgttcctctcatagtttacaaagagagagagcaagacttacaacgaatatacaaccattttatgattgttgtgaagatgttgatcatgcttcattactttcatcattaacaacatttgataaaaatacaagttattgtaaaataaatgaagaaaaattgaaaaggttattaaataatgatggttcaaataataataataataatagtaaaataaatcaaagatttcaacaattaaataaatgcattgaaaataaattacattttataccaattattcaatcacaaactgattttaaattaggtgattgttcatatttagatacatgtcataaaatgtcaacatgtagatatattcattatggacaattaatgccaacgatttataacaataaattaaaacaatcaaatgatgaaaaattaaatgaagaagaggaagaagaattaagaattagtgaaacaattagaatttgggattatacgaaaaatgaaagtatttgtaattatcttaaatgtaatttaccaccacaatggattaattgtgatttaatgaaacttgattttgatgttttaggtaatgattatggagttgtaattgcagatccaagttggacaattcatatgaatttaaattatagttcactgaaagatgatgaattattatcattacgtatggataaattacaaaatgaaggtattttccttttatgggttacaggtagaacaattgaaactggacgtgaatttttaaataaatggggttataaagtaattaatcaaattacatggattaaaacaagtcaattaattagaactattagtacaggtcgtacaggacattggcttaatcattcaaaagaacatttattagttggtattaaaggtaaaaataaattaaatgaagttaaatggattaatcgtagtattgatgcacaaattttaatttcatcaacaagggaaacgtcacgtaaacctgatgaaatttatggaattgttgatagattgacaggaccaggtgttaaaaaattagaaatcttcggtagacaacataacacaagacctggttggttaactgttgggaatcaattagacggtacaaatttagttgaaacttcattgataaatcgttataataaatggttaaatagtaaaaagtatctgagatggaaaagacgcgtcttgattacctaatccatgttaaaaaattttcgaataaaaattaatttcagccaataagaattgtcacagtatgcttaacagtcattacataatcaattcaagaatttgtggtgcgacactaagtaagaaggagagagtaagtttttctataacagaggttaccataattataattaattaacattgctcataaagttttttgtagttcaattaaacaaggctattcatatataatgtttagaatcgttgcaaagaatcaaattaaaactattggtagaagatttcaatcaaatcttgataaaccagcatttgttgcagatccagcaaaaggtgcagaattcacaaaacatttaaactgatattgaacatcatgcaagtggttcatcatcaaattggaaaaaagtttcattctttttagcagctccaattattgcaattactggtattaatacatattttgttgaagctgaacatgcagaacatagagctcataataaacatttacctgactgaagaatggccagttccaaaatatccatatttaaatattagaagagttgatttcttctggggtgatggtgataaaactcttttctggaattctgattgtaacagacatgttaaataaattagttgataaaatttatttttaaaacaattattttcaacttattatccatatcatttcaatattattactcatattattattattattaatttatttttttaattattcttttataatgaattaaaaaacaaacttagtcgcaaaaaagagatagaaaattattaaattattgtagttaatcattaaattatatactaagaagaagaagaagaagaggaagaagtaattatataattatttgttattattagtaaattatgtagtaaaataaagatttgataaatgatgaaattgatgatctgttaatgataacaaaaaaaaatgcattgaagttttgtttaatatacaaatttaattcacaaattttaaagagttgaaaatatataaaggttattagttgcagcaattgcaacagaattttcatttggatgccaacttgaatgtaaaattgattttttaaaatctattgaatcaggatctaatttattaatcattgataaatttttacgtctatttgaatttgaatttaatttctttaatttaaatgcagatttatcagcttgtaataaaatttccttttcattttcaatttcagatttattacattcatttgttattgaattttgataaatcataaaattattattataagaacctgtcataattgattttgaatcaccactaaattgaacttcaaatttatcgaaaattgcatcattttcataagtatcacataatctttcccttaattgttcatgaatattgattgttttaattggtttattttccatattaatatcccaaattttaactgtcatataatctctacttgcaatatatctaccattatttgaaaatttaacatcagaaattgatgaagtaatttcagtgaaaaaattatgatttgatggatccatatattcttcaaaaattttacaatgattatcacataatgaattcattctcatatcatttaatttaataataccctttgatgatgaatacataaataaattacaatcatttggatgaaattcagaacttgttataacttcagttaattcttccatattagttggtttaatatcaacaatattaaaactttgatcttcaatatttaaattccataaattaattcttaaatcatcacttgatataaaagtttcttgatctgaatttatactaattgaatttatatgataagcatgagcatttgcgaaaattttctttggttgagcagctgttattgtatcatgatatgataatcttggtaatttaattttagccataaaatttgaattatttgaatttgaatttataattgttttaattaaatctggatttgtttgaaatgatgataattgattttgaatattaattgttgaaattggtgaattatttgttaattcattattattattattattattacctgtattacttatattattattattttcagaaactaatttaatttgcttttcataaattttccataatttaattgttttatcattagttgataataaaaattttgattgattaaaccttttcaaccatttaattttatttatcttttcttcaatttctaaacttttcaaataatcaaattctgcatcatgactttgaaattctgtataaaatttatattcacaatttgattttgattcatttctttcgaaaagaacaactctaccacctctgtcaccagttgctaaaaattcacctgtatgatcaaattcaacagttgaaattatatcagcttcagttatattttcaatatcacctttatcaccaaaacattgactaaatttccaattagcttcattattattagttgaatttgtattattaatattattattattattattattattattattattattattattattattactattattatctgcactatccattatattatatgattgtattgttattgtatattatatggatattatcaattgagtagtaaatattagttattagagttattattattattattgttatgattgtattatatattctataagaagtatagttgaatattgattatgagatttactgtttctaatcaaaccttatacctgtcatcaaagactctgtactgctgcattggcatgtccattttgattttcattatttaaaatttaatggtcggaaaattgaccctgtgaattgaagtggaatacgatgatgtaagatgaaatttccgagagtgttacgtaatgggatttaataaggttaagacatacaaaacatacattcaaatagaaaaaggttacttacttaaactattaataaatgtgtacaaaagtaatttataatataatataatataatttgatataatataatataatgtaagatatactaattaattaattaattgaaatgaaatgataaacatgataaaaacataattattttataaaacattcaattaaatttaaactctctttgcagcatcagttggagaaactttctttgcattttggttaaatcttggtctagcaggtggagatctaatttttctatcagttcttgatctaactctaacaattcttgaatgaattgcacatgagatacaataatgtaatttattgtacatttttggaattggatattcatcataaactgaagcttcagagatatctctaacagcagctgcttcaaccatatttctaacagtcattctttaattgctttatcctttggaacacatcttgaacagttaacacatctaactggtttaacgtgacctctaccagacttatttctaccgtttgcagatctcttctttggcatgtttacttcttgatatgttgaaaaaaagagattttaagaattataataataataattatagtagaaataattcaacaataatagtaagtagtaagtatgtaggtaatattgaaaaatttcagtaatgatagaataagggtatattgatgaacagaaattctctactgggggggccattggagggaccattggagggaaaagcgaggggaatggggaataggggaactgagttttttttctttctttggaaaatttagaggaaaaaaagttgcgtccttttacagtcacaaatattattatcagaaaaataaaaataataattagtaacccttgtgtgtatcacgtgagcatgaaaaataaaaagtgcaaaacccttctgcgacgcgaccgtcccgtctgttttgttttgcggtcgatgcgtctgtgggtttatacaatactttccatattaaattcactcaaccaataagaattgagatagatttttctactatttaaaatcacctgttttggattacgtaacccattattggtaagaggaaaatttaaaatagtagtaataataataatacagtagtggtacatgcaatgtattggtaattcatttattttgtttgaattatactacatttgcacctttaattaactatcaatccacagtaatgttaagacaatcatttaaatttgcaactaatgttgctaaatcttcaaatttaagaagtttttcaactactttatcaattaaaaattcaactccaaaagaatttaaaactgcaacaactttagctgatgttaaatcaaaatttgatcttattggtaaaggtgctcaagaaggtgaagttccaactgatttacaacaagcaactggtttagaaagatttgaattattaggtaaaatggaaggtattgaagttttcgaaactgaacctttagatgcttcaagaattggtacaatggcaaatcctgtacttattgattcttatgatgattatagatatgttggttgtactggttctccagctggttctcatgttgttatgtggttaaaaccaacaactgataaagttgcaagatgttgggaatgtggttcagtttataaattaaattatttaggtactggtgaatctcatcattaaattatattatattaattataattataattatattattattcaactttaacaaattacaattacttatattactaccattattatttatattatattccttataaatattttataaaattataaatttcgacttttattcattatctataatttttcaccattttcatttaagatctaattgatcttccttttactgtatcaaatcaatcccacacatacccatatatatacccataatgaaaccttctatccttgctctattcccaattcaacctacaattaacaattataatcaccttttggaaaattttgatataatctactatacattaacaacaagggaaaatttcataaatgatattaaatctgataaattaaataaaattcaagcaattttcggttcttatccaggttttaaatcaattggtggtttaaatgatattgaaattattaattcattaccaaattctttgaaaattatttcattatcaagtgcaggttatgatggttatgatttacaattattaaaacataaaaatattaaattaactaatgttcctgttgatggattatgttgcaatggatgttgcagattgtgctctttggcatgtattatcaggtataagaaaattcaattcttttgataattatataaaatctaatacaaatgatgcaaatactttaattgttagagatcaaattagaaatgttaatatcattaatgataatgaaaaacataaaggttttgcttttggtcatgtttatcatagtaattcaataactagatgttcaaataaaaaatgtgttatatttggttatggtttaattggtaaattggtatctcaaagaatgaaaactattggtatggatgttaatatcgttgttagagataaatcaaaatatgtttcccatagtgataatgatgataatgataaactttactcttcaaattctaaaactgaattaaccaatgcagtatcaaatgctaatgttatcatcatttgcttaccaggtggtagtcatactgaaaatatcatcaatgaagaaatcttccaattgatcaatgataactcaataattgttaatattggtcgtggttcatgtataaatactcaagatctaaaggatgcaataaattcaaagaaaatctctcatgttggtctcgatgttttcccaaatgaaccaattattgaaaattactggtttaatgatcaattaactaataaaacttcaaataatttttatacttcttcaataactcctcatttaggtagtgcaactttagaaacttttgaatttgcaactgaaacttcaatttctgatattattaacgttattgaaaatgatacctataatcatgtcgttaatccataatatcatataagtacactcatttaaccattgaaatttccttttccatgctaatcattatatttttataatctgtataaattaatttccatgaatcaatactatccttacatgtctttattgaaaatttcctctccttatctaattgtatcatattaccactctttaaattatcaaaaatttcattaatatcattaatacattcatttaaactttgttcacttattttttcaaatatccaatcacttgaattttcatcattttcattttcattatcattatcattaatctcaaacatttgccatggtttacctaatggccaatcactccaatgaatataagatgcatcattcattatttttttactttcccatccaaatctatcaactcccataccaacttcaatttcattattataatcatcattattattattattttcattactaaatttaagaaaatcaaataaatttttattactaccatcataattgaatctccatgaccaatcccagtatccaatatttggataaatttcaacaacatcaccaatattcaaaaattcttcactttccttggaatttttaatcctttcattaattaatttattatttttactattcaaatatgaataatcaactggactagttaaataacttgaatgttcatctaatttatgtctaaactctcttgataataatccatatggataatgtggtataatcattaatgatggtaatatcctttcatttaaccattcattttcaatcggttcttttttatcattaataaaataattattatttagtaatgtatatggatcccaaattttattgataatttccatatcatattcttcttcaccttttttatcaattatagttaaaatccattcaaatactttttcatttggcattataaccataaaatagcttgataaatcaatattatttataattgataatgaaagctccattgatggtaaattattataaaatttaaaaaaatattcattattaaattctaattcattctcaataatttttttgtaaaaatcttgaactgataaactatattcaaatggtgttggtggtatctcatcaagtttattattatcaaaccaattttttgattgtttataaagatccttttgtttaatataattaacaggtaatgctaataatgatggtggtaatgtaaataattgatccatgtgtttataaattattgaatctccatcaagataaataattctatctaaatgtgttaatgaaaatgcatataattttgtaaatgagtctgaccaatttgttgaatcctttaaaaatttagatctaataggtttaactaaattaattttaacaaaatatctttccttcaataatttaaccatatttgataatctcgggttcttttcctttgatatattttcaatattaaatgaacaaattaattcaatatttgctcgagttttaaatttccttaattgtttaatattgatcaaaattggtaatagttgatcctcatcagtaacataaaaaacatatgctaatttatcccatttaatcttatcaggtgcctcaatttgcatagatttgtaattttgtattatattttcagctggtatatatttaatactctttgtatcaaaatgagcttcactaatatcaacttttccattgttgttatctttaatattgattatcgaatgtcgtttcttacctgaaaatgtaagtaaataccatatgaataaaattatgactgtccatataataggcacgtgtgtgtcttctagttatcattattcaacacagaaattctcaataccgtataataaatacagattcaatcatcaactgatcactattcatttgaaatttgatcctacatggaaattcatgttgctaatagataaatacacgagccaccaaatatttcaaggcgacgtatagacgcatacatgtttttcccacattgtaataaattatcaccactattattaaagagtttacacagtcggattagttatttagagtgaataaataatgttagtttgaatataaaactaaaaacaattaaatagtaacgaaagagaactataaattctaaatatataaatgatttaatcgaaatcgtattaaatcaatacaaaaccaataaaaataattataaattgattgtaaatgaagtcaaattgaattaaatcaaatgacaaagaaaaaacctaaaataatcataacaaaacttaccaaaagatgcattcttaaaagatgccataccttcataaattgaaacgctagtcgctggacctgccgcggtagttgaagttacaaatgaagcttcaggggtattgtaaacataattgccatctgttgttgttgttggacttgctggatatgctggattagtagttgaattagtagctgggttggtagctggattagtagctggattagtatctggttggtagctggattagtagctggattagtagctggattagtagctggattagtagctggattagtagctggattagtagctggattagtagctggattagtagctgtttcaagtggtgggttattaacttcagtattttcagcaggttgagtctctgctggaactgctggaacttctggagcagttgtatgtttagcattacattcattatctgaacatgatgtaattgtatcagtagtaaatgatgtagcagtttcagtagagcctggggtggttgtttcaggtggtggggaaactaacacggtagtttcagatctataacatctgttatctgagcaggaagtaattgttgcaagtatgtatgctgtgtcggtgatagtatacttagcaggttcacttgtagtttcagctgggaaaagagatgataacgttattggtaatgaagatgatgaggatggtaaacacgatgatgctggttcttcaacgacaactaatgttgcattaacatacatattttcataattggttgttgcaataaatgtagtgtatgtagttgattcacaatcaaatgcagtttcggtagtgtagaaaatattacatgaagctggtggagttgcaatttcaacttcttcaaaaacaattgtactaccagtagtaatagttgtggtagatgttgttgtatcaatttgacaaatggaattatcaaaaactatagttgaagtggtggtacttaatggtgtgatagttgaataacttgatgagaaacatgattcaggtggaacataaacaataacttcgtcataagatgtaacatcaaaagcatcaatactagtgatgtaactagtagtagatgtagtaagctcacaataactattagttgaagtgatggttataatttctggtgatataaatggtgaggaagtagaactaaaggatgttggggatgataaggatgatgatgatgatgatgatgatgatgatgatgatgatgatgctgatgatgatgatgatgatgatgatgatgatgatgatgatgctgatgatgatgatgatgataaggatgggaatggggatgggaatgatgatgatgatgatgatgatgatgatgatgatgatgatgatgatgatgatgatgatgatgatgataatgatgatgatgatgatgatgatgatgatgatgatgataaggatggggatggggatggggatgatgttaatgaggataagataaaagtaggagctaatgatgatgatgatgatgatgatgatgataatgatgatgatgatgatgatgatgatgatgatgatgataaggatggggatggggatggggatgatgttaatgaggataagataaaagtaggagctaatgatgatgaggataaggatgaggatgaggatgaggatgatggggataatgtggaagatggtgataatgatgataagatgaaagtaggagctaatgatgataagcgtgatgagggtggggaggatgatgataatgaggatggtgttctaatagtgctactaaaggtggtgagtctattggatgcatctctagaagtacttgtacaagttgtaggtgtttctaaaacaataatatcaacaaaagtagttgttacagcatcagaaccaatagtggttatagtagttgtagtggttgttacttcagttgcacaagatggattaactgatgtaattagatatgtacttggatatgttgtaccttggtaaacaatagcatgagttgaggtaacggggtatctgtttgaacttaagacaggttgttggtaaatattctgttgtattgtaagtacccgtccatgttgtatagtctgtttcaacttgaggtcttttaacaataacataagttgaagtaccaatagctgatagagaattagatattgttatgtcagttgtaattgtactaaaactacttgaatcccagaaatataatgaagttgaataaaatggaacataatattcatagttgaacccagcaacggtaccatctctgtaaactgtacttgttgaaattgaagtagttgaaccagtccattgagaaatttgaatttggggagatggataaatttttatttcttcccaatatgtggtacctgatcctgtaactcttgaataagttgtggtaccaaaaactttattgctccaaaatgatgtagtttcagtgataggaccccaaacttggacaataggtgagttagcagttgtaatagttgttgttgattcaaaagttgctgaataaaaattagtgtcatacattggacgataaatggtgttaatccaataaccagtaccattaccttcagagtctgtacccaacgacactctattcatataagtcacactatatgtattctcccaaaataaagttgtagtacttctactgaaatcaataaattctcttatagtagttgtgcttggatgaccttgtgcatcaactgtagtaatggtagaataagaagtagccttgagttaatctattccatgtacttgttgtctctgacatatacttattttctctaacaacccaaacagatgtagtacctgaagcaattctaattgtagtagttgaaggagtataatttacaggatatgcatatactggttgttaatggaggaccataaacataaataacactggtagttgtatgagcatctgtgctagtaagtgtggatgttgaataggttgtataagttgttggaacatatatagttgatggaggtggaagatgaatataaactacagctgatgattgtgttccaccaatcatggtataaccggtataggtatattcttgggtaacatcataatagtgtaactgtagttggaacaggtaaatattcataaataatctcaccaatttctgtcacaccatttgatgaaatttgacctgttactgtggtataagatgttgttgtagcagttccagttccaaaaagtgttgttgatgaagttaaaagattttgtggataacggacttcttcaacaacataagttgagccatcagagactgttacatattcagctgtaacagtgctttggccggaaatgatataagatgtagaagttgaaaaaacgcttgatacaatagttgaagaacattgagcattggctgcaggtgatacttgataaatatagttacccgcatcgacttgaatcactttcaccaggtaaagtaacttgaatatccattccaccagcactaattgaattcaaataaactaatcttattggataaaatgaaccaccttccaaataaacccaagatctaacttgtgaaccagtaggactattaatttcttttgttgaccaaataaaatcagattcactttctgttgttggaatactaccaggtgtacaacaagtataagcagaagaaccaataaacatcatagcaccatcatcaacattaagtacattaaattcagtaaataccagtagtaggagctataataaaataattagttaaataataattatgttagtaaccattcataataaaatgaaaataaaaataatattgataacatacgataaaaataacctgttgattctaaaacaaaacgatttgaatctaatggaacaccactaaaagttgtatgtgaaccatctaaactaaaactaaaagttgtcataccttcgactgtaccaataatttgaccagttctaaaattagattgataaaaatttgcatcagtaattgaaagtgtattatcttgagaatatgaataaacagtacctgcaattcctcttgaagatccgagattatcccagttacatgcatcaattgaatcaacaaaattagagtcagatgtatctgcaaatactgatgtcagaaatgttgtgaaaagtatcaatgatgataacgttgaatgtagaaccatctttgataatttaatatatttgtatttatagttaatttgtaatataacttttgtttgacaaataaatttaataatattataaaaacaaataagtaatgttagaaaaagttctatgactgaaaagttcccaacccagatatttatacaaaaacatattggcaatttatactgaaataaaatgacctaaattaggaaaacttatggaagtaaatgtaaagcccaagtcttgagatctttgaaaattgaaataaactgatatatcagattatcagatcaaaatctgaaattactcaatctaagcaaacataaaacaataagaataagttataagaagaagccttgttacagggacagtgaaaaatcttatcttctacattattctaacgaaagtttatttgcatgaatctaactttccaaattgagccattaaaaataatgttatcatagtcataataagtgcataattataattcgtatcacataaaatttgaaattaccataaagtttagcttagtagaaaaataatagaacaattaaaaatagtgaaaaaaactatacaagaaaaaaagaaagttaagaaaatttcatgatctcgaatatgcatgcattttgttgatcgaacataaactaactaaaaaataaggtttgggcactgaaacaattgaataattaggggtgggacgatttaagaattatttttcattttactaattattcccatttcataatttctattgtctttgatagtggtttgttgttttttattcttttttattgtcttaatttgtatcttgataagttaacaattaaaattatatagtatttagctcgtatataataattcttagtctgtttggaagattaatgcagagatcattaggcgaaatggcagtcccaagtacataattactactaaagagctatactaagggataggatgagtactatttcaaactaatctgataggattatattacaggctgagccactatagtgagaaatgtagatttttggaggaaatttttcttgtgttattgaagacaaagattttttaatattgaaatcattatacatgaattattacattactatatattttatacttagttgttttatatagaaaaactcttagtttagtgttatacacgctataaaagaatattacataattcaggtttatcggccgactctacttttagcaaaattattacattttaaacaaggccccataccaaaatttatttaatatacacacactgcactaagattctaattatgaggtatatatcatacatataactaatagtccgtttcgtaaaatgtaaatagaacttttactaactgagatgtaattataattcaattactcaattactcaatttgtaaacgggatctacaaaatagtctttttacacaatgtttgggctctctgatactaagatttacatctcggcttaattatttatttatcggtaattattgtaccactaattttcattttattttattttcattttcaattagataatatttatattactaattacaaccttatattacttatttctttcaaatgacgtcaatgtgacgaagaatactggtaaaggtatatatgataaagatagcaagggtttctttcttttgtgcaaaatccgacaggaatgttagaataagagttacttacggatattgattagtgataatgtatgttatataaaaacatgtataattaattagatacggcgagttatgtaccatgggctaaccactagacactcgatgaccaatcccacattattagtggtatatagggctcaccgggggtactatcatgggtgatgggatcatattatttacctcgggtacctttcattagtctaaatagccctaatgtatagactaccggcctctgagattaccctattaggtatatggtccgaagtttaggcattgggtaataattctatcaagtgatctcatcgataacgataacagttgaaaattttttgcttaaaaatttacgagataaagaaacgattatcattgcggggatcaccaaatctgtgaaaaacttctataatctaaaaattccttctttgattgccataaccagtccccgtgttatctcagatagtgacgtttagttggtccctaaaagttccattctgaaccttatttaacgaactagtatcatttttcttaataatttgacataatgttgtaggtattgctgctaattccccgcacaattatcactaagatacccttttgataaaaattcattccgtaaaatcaacaactctctaaatattgttaataaatgactatagaatagaagtgcatatagggtatataattgtatgataaaatgtaagtttagttaactatattaaaatgatgaaaatgttacaattatttcataattttatcaaagcttacataattatgggctacaatcagttgattgttaaagaatattaaactaattttagtcaatatacttaaacggttccacagatgtataagaagatatcgaaaatattatcaagttaataatcgatgccttaaactaatttatttatcaaaatgaaaggaagtggcgcattaattttttaactgattacgtaatacccaaatgacagacaggtcgatagacgtcgattaattttttttcaaaatcaccccgcaaaatggagtaacttttcaatatatccggagataaataacaattgtatcagtaacccaacaggtgatgaaaaattattcagttttatcacgaatttacttgatggccttattatgttggattagtttcatgttgaaataatttaaatcaccttgtggggtcagcatgaaacgtttttttattgattattaatattttgttcattagtataaatacttgaatctatccctcccaaccgtgatgatattatcataaactgttatgttatttcatgttaattagcatattaacatactcacatactcataatgaatgaaataacatatattttaagaccaactgaatctaataatatacaaaataagagaagaagttcaagcaatcttcacatttaataacaattctaattctaattctaatttctttaagaaacaaagttttcataatgattaatttaatatcgaatgatcaatccaagccaagatccatttagtttaaattatatttcacaagctcaaattgaacgtatgaaatattattcatgatgtatcaccaattctaattttatacccattaataaaaaaagttcattatttgatataattgaactttattcagttctttctcatttatcattatcactactattatcctccaattttttttacaaatctatataaattgtgcaaatatatatattattgaataaaattttttaattattaggttttttttttatacaaagaataaatataattaatttaataataataatgatataataataataataagagtttattgatctgatgattataaatcacttctagtaatttttgaaacatctaaacattcatcttgaattaaagtttttggaccagaataaggttcacaagattctctctttgttgtaccagcttttaaaggtttaccatttttaaaactatctaaaatttttaaaatttcttctttatcatgtaaatcttcataaaaatcatcatttatttgaaacattggagcatttgcacaagcacctaaacattcaacttcctctaatgagaataaaccatcatttgaaatttgaccaggttttaaatttaaattttccataattgtttccataacttgatcagaattacataattgacaaggagttgttgtacaaacttgaatatgatatttaccaacaggttttctttgatacattgtataaaaagttgcaacttcataaactctcattggtggcatatttaattttttagcaacataattcattgcagatattgaagtaaaaccaatttgtctttgagctaaatctaataatggcatacaagcacctttcttatattgaggtggatatttttgaattataatttcagcctttttagcattctcttcagtaaattcaaatggaatttcaggattattttctgcagtatctctatgaactgaaattatactactatttctaataaatgaattaaatttaaattgattttttatattatttctaatattatttcttatagtattttgaaacattgaaattgattgtgaatatgttgtgttatgaatatatttaatgcttgatctattagataattatataaaaactgttatgtattatcacttcagttaatacaaattatttttcccctctcctataataaaccattataccctcacttaatagtaagtaaatttcgacgaatgagattcttgttgtttttaagctgaaaacttaaaaaaattgaaaaattggaaagatctgtacaccatattaatattttcttgttattatgtaatcagtattatgtaatcactcacgtgaccatttcattacgtaatgagtttgtaaaagaaatttttattttgagtcattcttcttatcatgaaaatcaatagtactaaggattttaataatagaagtaattaattttaattttgatggtgatggtgataaatgccacagtttttaaagcttttctttttttaaaaaattttgtttaatacttttattatattttattataccttcttttattacatcacaaactttacaaacaatgtcaaatccaaaatataatataaatacaagaattgttaaagttctccatgaagatggtaatcaagcttcaattccaccaatttatcaatcaacaacttttaaagctgattcaattgattctttatcaactaataattatgattatacaagatctggtaatccaactcgtacaactttacaatctcatttagcttcaattataaattgtaaacatacttgggttgttaattctggtatggcttgtttagatgttatactttcagcttttttaaaaccaaatgatgaattaattgcaggtgaagatttatatggtggttctgatagattattacatttctttgaaagaaaatcaaatattaaaattaatcattatgatacaactaatttagaattaatgaaatctaaaattactaaagatactaaattaatccttttagagagtccaacaaatcctcttattaatgttgttaatgttaaagaaattacttcatatgctcataaaattaatccaaattgtatcgttgttttcgataatacaatgatgactcctttattaatgaatcctttagaattaggtgttgatattcattatgaaagtgcaactaaatatcttaatggtcatcatgatattatggcaggtgttttagcttgtaataatgatgaaattgctaaaaaattatttttcgttataaattcaacaggttcaggtttagctccttttgattcttggttattaattagaggtttgaaaactttatcaattagattagagagagaacaagaaaattgtatgaaattagcaaattatttagaaaatttaaattttaaagttagatatacaggtttaaaatctcatcctcaatataatttacattttagtcaatgtaaaggtcctggtgcagttttatcatttgaaactggtaatattaaattaagtgaattaattattaaaaattgtaaattattttcaacaactgtttcatttggttcagtttcttcattaatttcattacctttaaaaatgtcacatgcttcaattgatccaaatgttttaaaagagagaaatttccctcaagatttaattagattatgtgttggtattgaagatattaatgatttaattaatgatttagataatgcaattagattagcaaagagggaattaaatgctaaattataattttataatcaaattttactttgctatttagctattatataaatattatatacgtaaataaaagaccagcttttattaaaaaaatttataaacaacaacataaccatccaaagaatgattttttacgattattaaattcttcatctatatcatcattataatcatcattattataattattatagttttgatgactattaccttgttgtgaatacatatattgactgccactattattattattattatttaataatcctgaacgttcatttacatgagatgcagaaactgctcttgttttatttttacttgcattggatagtctatgttgttgttgttgataatgattatattgattattactattattaatattattattatttgaatttgatgattgattatgtgtcataaaatatccattattagaataagtatgtgaatgtgaatgagaatgtgaatgagaatttgatctttgttgttgttgattctttaattgttgtgcatataattgttgttgttgagatgattgctgtgcttgtacttgtgcttgtgattgtgattgattattattattattattattgctatttgacatattagtttgttgagtcgttgtatgacgtacacctgatccataaccattaagattaatttttttatttttattccaattccaaccttgtccatcatttaatttcatccaatcataatcaaataattcaacatcattaatataatcaaaatttgatttaatattattctttaaatcaatttcttctaaaattgatgcaaataatttaatatatccaaaataatcaggagtttcatcaaattttaataatctaactcgccgtatatattcactaatttgaattggtaatccattacataattcattaattggaattttttgtttcttttcaccaattttttcatattttaatttatttgttggtgcctttaaaccttgccaaggtaattgaccttttagaaaataaacgaaaacattacctaaactctctaaatcatcccttcttgattgttctctacctaaatgtgtattaattgacatatatcttgcagtacctgataatgattttctttctctataaggtatatgattatgattaattggatctctatattgtttaaccataccataatcaaccatataaatagtattatcatttgatgatgaaccaattaaaaaattatcaggtttaatatctctataaattaaattattttcatgtaaaaattgaattctttcaatcatttgaattgctaatttacaaacagttgaaattgaaaattttctaccacaccattcaaataaatcttctaatgaaggacccagtaattgaattattaaaatattataataaccttcttgaccgaaaaaataaactttagggataccattaattgataaatatttatttttttcaatttcataatttttataataattattaattgcattatttaaaattttataagctctaaattcatcctttaattgaggtgcttcacttttacgtgattcaaatttaattgcaactggttgattagatcttaataaatcataacctttaaaaattataccaaatgatccttcaccaattttttgtgcaatttgataatgtgatgcaattatgtttctatttttaccattagaacgtgatgttgttgtactacttactgatgtatttgcaggtgatgattgtgattgtaattgttgattatttccattgttatttccattaccattaccattcccagatactatattattaaaagtccctacttgattatcattcccattgccattcccagatgcatttcccgcagtggaaggatcaagagatgtcattgttacagtgataggatagataataaagcccaaaataagaacaattcaaaagaaacaaccttgataaaagctcattttccaatttctatcatcaagccattttctactgttttaaaattcacagtatagcacaacaacaactcttcgctatcttaaaatctttaagtggagaacctgtttagggacgatgcgtcgatctattttttatcatgatttattatggttatatactggtttatatactggtttatgtacttaattatttcttgttcttcttcttgttcttcttcttagagctcttcttggaggtgttgacactggaagtggtggtgtctgcttcttcaccttcttcaacttcttctgtagcttcagtttcttcaacaggttcttcaactggttctttaggttctacaactggttctgtaacttcttcagtaactggctccttaggttctgcaacaggttcagttatttcttcactagcttctttagtaacttcttcagtaacttcttccttaggttcagttatttgttcagtaacttctttagttacttcttcagtaacttcttccttaggttcagcctcattaattgatgtacccttaagttcattaacaacttgttcgacaatattatcttcaacaggtttattttcttcatcattaatttcagtacttgttggttcaacaggttcctctaattcttcaactgataaaacatcatcatctattacaaatgaatcatttgttgcaacattttccttacttggtgtaaaatctctttccttcttaataatatttggtgaaattattgtctcatttggtaaagtttcatcctctctctttatatttaatcctgttttagcagaattagtatttggaatagtattattcttaacattattggtattatttctttgctttttcattaataaatctgcatcatttgtctttttttcaactaattcatatgaactatcaattttctttgctctttgaattgattttgattttaaaacatcaaaataattataattcttaccattatacatataatttaagcattcatcttcatcaatttcataatgatcatcctcaaattcattacaaacatttgataaaaattcactaaatgaatctgcaacaacaaattttgtattataatctctaccaaataaaataatttgaccccatttaccttcaatattaggatttaaatcaattgcaatattattaccaacattatccttaacaaatggtatccataatggatcataataaatttcattgataaaatttggtgggcaagatttttgaattccaaattttttttcattattattaacattaccattaccattattattttcatatttttcataaactcttctccaaatattagtttcagctgcaattgcctctaaatccattaattgataatcaaatattaaaccacgagttttacccattgaaacttgaccatcatgaatttgataactttccctaaatgttgtaggtaatgtaatatttaaatcattttcaaaagcatttaaatcattaacagttgcaccaccttgaatatcatcacctaattcagggaattcagtatctaaccaatcatcaattttttcccaaatttcaaaaatatctcgtattggttgaccattttcgtagtttcttaattcaatttgtgaatcattatgtaattgagatttcatacctggacgatatggaattttagatgatgaaccagtttgtggtctattatgtgaaacaagtgatgtagttgaaacattaatattgttattattatttttcatattatttaatgatgtagttgaaccattcattggacttaaaccattttttggagacgaaccttttgatgatccaagattatttgaattgtttaccccaccagtagcgtcatattgtgcataatgatcagatgttgtaacattatgaaaaaattccttgacatttttgaaaaaactcatagcaactaagtgtgtagtgtatttataattatatttgtattatatatatatatgggtttataatatacaatactacgatatacaacgaagaaaagaaggaataaagaaaacaaatcccaataaaatcaacatcaacatcaacaacatcaacagaccttctcaaaaaattcaatttccctcacttattatttattatgttgattagctaattatagtctacatacacttacttacttacttacttacttacttacgacccaggagtatgtccagagtggttaattgagactgcgtggatggtcctttatctgtatcattgtcattgtctgctcctctctgagaatgtgctattgtcttgattaatatttcgacgtgttcttgcagggattctagcacgtacctcttgctgatagtgaattacgtgatgaattggcggaattagtagtaagtccggatggtataggtatatcaaataaacctgttgatggtggtgatattgaattagtttgaattgcttttgtattagatctttttagttaccttaggtgctgtgtctatctgtgtacttgtagggatattctcattggatgaaaacataattggacctgtattcgatttgggtttgtgtttgggtttgggttttgatgtattggatttatttggtttgatttcttcttcaattaatttaacatcctgtaattgagtttctgtcttgattctctttgcaagttctcggaaactctttttaacatctcttacattatcagtaactaataaactatcaatatcaccatcactattaccattaccagtttctaaacttaatttttgtaataattcaatatgttcatcctcctcagtttgaacaaatttatttaatatactcttatcttcttcatgttcaagtaatgtctccagtgtatcagtaactttcttcttagttagcataatcaaatctttatcttgaattttatcttcaatcatactcagtatattattctctccatcatctaacatatcctttaattcatcaaaatcactatcatcactttccatttaaatgaatttcactatctccatcaataccttctccacttttcaataataattgtttaccattcttaccatatcttttctttttataaaataaaacaacatcattaatatttgcaactttaccaacaaatctatttgaaaaaaatctaggattttcaacttcatatcctccagaatattcaactcttaacctaattaatggtaatggtatatcatcatctgttaatattccattctcaaacatttcaatattactatttttccatctgttatttgcattatctatcatttcttcaatttcctttgttaagtattttaaaacttcattcttattaaaactagttgccttcaatccagttttcgataatattatatctttcataacaaatggtctaacactttttaattttattctctctaatgaaaaatctttacccttaacattaagtatgaaaacatgcttatctaatgtttcaccttcacttaatgatgttgcaattgatgatcccgcctgtaatatataactaccagttatatcattctgtattgcagatggtttacaatcatgttcatgtccccataatataaaatcaagcgttgtaggtaatgatgtttcttcaagtactttaactccaggtctatgaacatgattttgatgaacacacattaaattaaaccattgaatattttcatcatctcccgtatctggttctaaaaattctaaattaccacttgataattgtctttattaatctttcctctctgatactatgtaatccatataatgctaaattaggttttacccttattaaataataatggacaaacagtaattttttcattatcaataactctaccaaaatgattcaataaacctccaacacttaaaatatctaatggtgataataattcctctcccgttgcatcatcatgattcccacttattgcatacattggcataccaacattaacattcatatcatattctgcaggatatacaaaatgtttagttgccattgcatcacttggatctgaaactaatctatattcaattggtttatcacaccaacattgttctcttaatgttctcattacatgataataagatttctttgttggtgaattaatatgaaataaatcaccaccttgaacaaccatatcaacatcattatctcttcctatctttaaaatttctgcaaatgtcttccatgaatcatctcctctaatttgatcattctccatatatccaacatgattatctgttgttaataaaatacggaaagtatcaggtcctggctctatatatgatacttctggcatactatccaggaaagaaaaaatatatcatcaagtctgatgctcaattgaacaaattgaaaaatcattctgtcttgtttatatcaattacgcgtaccctttatataactttaaactgtacttatacatgctacacttgctgtccagcataataaactacatctctacataaaatagtaactcttttgaaaagtcttctccattctaaaggatctccagttttcctaataaaatcaattcttcttgctacaagattatcagcaactttacttaaaactatttcacctgataatcttgaattataatcatcaataaaatcaattctaaatcgtataactccttgataaactttattatctttaacttgctgtgttatttgttgacattcaatgtcattctcacaatcaataatattcaattgtgatagtgattcagttaataatgatacaattgtttctaatggttcaaatgagaaaaatcttgttaaattatctgcatatagttcaggatgtttaacaattttttcggttcttctattaatctcttcattaagcttcttttctctttcttccatactaattgagttttcttgtctgtaaaattgtaatattgctggatccattgcaattaattccaaatccctttgatgtttaaaattacttatattctttatcttctttctcttactattctcggtatatggttgttgtgatgctgaataattgttcaaataaagtttaccactggtatcatctaaatcatcgataatatgttttgttattggctgtgtagtctatttttctcttattattactcctttgtgtatttgaatactctgtaactttttgaaattccttatcactcatattaatgtataagttaaccattaatcttgcagttaacttatttgcatccttacacatccccttatcattcaatagtcctctatctttaataacccattgatgttgtttaatcttaggtatagtaattctttcatctatattaggtacaagaatttttcttaataaacttaaagcacctaaatcaatcttattccatggattaaccagaatttcgcccttattcttaatataatatgcataatcagtatcttccataactggcatttcccatgcaattttacctgtaagtaaaacaaataatacaattccacatgaccaaatatcacataatgatggatcataattacctgaaacaatttcaggtgctgcatatggtggtgatccacatgcctttgtgcacattctctttggaccatttttctttttaaatacaactgataatccaaaatctgttagtttcaaattacccattgaatcaagtactaaattttcaggtttaatatcacgatgagcaacaccttttgaatgtaaaaattcaactgcgttaattaattgtgtaaaataaaaatgtgcaacatcttgatcaactcctagatcaggttcgattttatcaaataattcacccttttcagctaattcaagtgcaatccatgcccaatttgtattatatgcaaaatcatacatcataataatattttgatgttgcatttgcttttgaatatatgcttccctagctatatcttcaggccgtattcctttctccattgcaaatggtatataaaccagtttaatagcaacaaatcttggatgtgaggcctgtgtttcacctctcttaactatggcaaatcctccatgtccaatagtgttccccaaagtgacgcgttttattggtggtaatggcgccatttgggaaagatggtacatttgtgacattatgttcgtttgtttataatatataatctatgaatatatgaatatacaaggataagaaaaaggaagaaactcaaaaatactaacaactctgtggcaagtggaaacatgttttaaaatagatcaaactctttgtttacttttcatcgcgtttcattgtacgtctcttaatgtttcaaagtgattaatcacagctggaaatcaccggttaaatcaccacttctgcaagatctgtaatccattcttgtggtacgggacggtataccttcaattcaccttctgataagtaactgaaatcaagatctgaaacacggacttttttaacaccattcatattttgttgaattatctcaacccattttaattttccatcactggatgatttatctcccggtttaacatctaatacaatagctgtatgatttggtgatccacatgaaacaattctttgtggatatttgaaaacacaatttttaaattgtaaaatatcaccacgacgaatttcatcactagtactaggaacagttacttttggtatattttcagatcctgtataagtacaaattaatgcaccatgcacatatcctgtagatacaaatgcatatttaccacatgcacgttcaagtgcatcatgtgctaatgtccaacattcaccattacctaccgtttgaccttccttaacttcacaccaattggctatatgttcaccaaacttttcatgaccttcttttaataatttagcacttgcagttggaggcggggtaaaacttgtctcactcgtaagagtatctaaatggattagcatcacctttcttccaaactaattttaatcgtaatgttgcaagatcttctaatctaaatgcataaattttaaattctttggcaccaacagatccatgacttaattgatagttaagaccttgtaaatcttttggtaatttactattatcatcctttgtaaaccataaagatgttatttctaaattcaaacttggttctctccatgcaactgtatttgcacttcttggtggtggagcaactggtgccttatttctacttggaggaggtggtggaactgaacctgatgaaactgagttcgaagctgatcttctagatgctggtaacggtgctggtgctcttaacataatattatcattatcaacgttttgaacttcaaataattgcttggatttgacaggagtttgaggtttaattctatgaggtggttgcagttcctcatcatttgttaatcctggtaatggaataccttttgaacgttgtgctgtctttcttacaggtaatggtggtttatcttcatcaaaactagtatcagcatctgcttcacgtctgagattttgtgcatcatcggatacatttcttccttgaggtcttcttgatggttcaggtgttaaacttgaatttcttgaatctcttctctcaaatctctcaggctcattggatctcttagttttcaaacttctgtatctatcttcatcatcatcgctatcgaaatcatataattcatcatttattcattttatttttgattttttctctcattttattcaatccacccattgcttgtttagctaaaggtcctgatttttccttagctgcatagtaactatccttggagaatgatttagcagtattcagaaattgtgacgatgatgatgaagcagatgaaaatgatggtctttcctgtctattacttcctcttccatatccataatcatcatcagaggaatcgtaaccatgagaataactacctttacgttcacgttcgacatgttcattagttcttgttctaggtcttggtgtaggtcttggttttattggtgttttatcattgttttgtgcattagaatgattatttgaaacatgtattgatctctcatcttcatattcatcttcgtattcatgatcaacatcgctattagggatacctgcctcaatttcttcttcacgtgaagtttttggtgctggttttgaaacattgtttcttctagtaggtaattttggtggtgctggttcggcatctattggtttggttggttttcttgcaggtaatgctggtggaggaccttcttcttctttttcctcatttacttcttcagatggttctttctctttcatttccttttttggagcaggttttggaggtagtcttctagcaggtggtggtggaaaaacattattcttcaatggggatctcataccttcggcaaatgcaatagaatcgttatttgattcactattgccattatttattccaacagatttcttcaatggagatttgaagttattgtgattcattgcatatgtcatagcaatatcgtttggatttctctgtggtggtaatggataaccttttttatcaacacctttcttgaatggacttgcaattgtttcatttgttaaagattcatcttgtttattttcttcattttcaggttcggaatcagaatcagagagatccattgacattttaattggtttggaaactactgaatcaatcgtcttttgatcaattttcctagttgaagcattagtctttctcaatccacctcttaaagatgcaataaattcatcaccattattgttattgtcgttttcatcaacaggagtagcacttttcaattctggtttctttgcaggaacagggggtaagtttctaggtttgggtttgattggtggtggagggcctttaattgttgacattgcttattgaagtaccatatatatatatctatctattatataatattacaagtaggggtatatacctaaaagagttaatgttgatgaagtggacaattagttgtgcgtggtgtgttatgttaagtttgtaaaagtcgctagataaatgttcatattacttaatatagaaatgttattactggaaccttccagaagggtaagtaagcaagatgattactaataacaagcacatttaccatgcttagaaggtaaagacagctatctctcctacaactataaatagaggtcctaatcccctataccacgatgtgaagttaggaatagttccttatgaacaacgaacgaacaacgaacaatcaacgaatctaaatgaacagctattgaacatctacaatgttcaattagactttcataaggacatcacatcaatacaatggaacatcaattactctataatttatataagaactaccatataagttaactaaacatttatatttaaacatttattcaactatttattatacctagtcacacgcgagttcaccctggttaatgtgtgattttacaaagttaaatatttgttacgtattcagtttatagcctttttcattgcatattatgcttaatttacattttctttttcgacaatgaagggattgtactctataattgcattattatcagtagtttcagctcatggaagtcatgaggaaacatataacaaagacagggaatataatgaaccaattcctgaagaatataatggatcatgggaacaatggcatatggctcatgaacatcaattagatgattatacaccagatgcatttttccaaattcatgcagttacagatccaaaatatttgatgactaatgatattttacgaatgtatggtttacaaagagatgaagttgtcggtcaaggtgatggtatgggtaatcatgataatagtgaattagtttcaccagaattaaagaataaagtaattgataaaatattaggtatgatggatactgatcatgatggtaagattagtatggaagaatatttagaatatgcgactaatggtggtcagttccctgattttggtattggaccaggtcatgaatatgattttgaagaagagtatgaaaaacatcattggaatgaatttcatgcaaatgatgatcctgatgttaaaataatacataaggaagatattgaacatgaattattacatcatttccatgaaattgatcatgacgacgaagatgctcatgaaaatccaaatgctccaaagcataatgtacgtaaaccaatattagttaagaatattccaccaagtttccaattttaatatcaatagtatttttatagcaatcatatactttataaacagtaataattgaaaaatcaatcttcaacattattttactgatcgtacttttttttttttttgataataaattaaattgaaaggatgtttatataagaagtaaatacaaaatactatatatcaaaaaacacaccttaataaaattgataaaagagaatatttgatattgatttatttaaaaaagttttaaatgaaaatggaaattaaagtaaaaaacaaaaactaaactttataattaattaaattaaaagtcttcatcatcagatgaaacataagcatcacctaattccttcttcttcttcattctttccttcttcttctttcttaattcagctgatgataacttagccttcttcttagtagcagcaatcttgttacccatagcatcgaatttatcaccttcatcttctttcttagataatcttggaccagcaccttgaccttgaacccagttgtgaccagaaggaatcatcttaccagcttgaacagcccaaatttcttcagttaaattcttagtgaattcagcagagtgagtaataataataacaccaccttcgaatgcctttaatgccttggataatgcacctaaagaatctctatctaaataattggttggttcatctaagacaattaaatgaggtctttgccatgtacaatgcagctaaaactaatttaaccttttgaccaccggataaacctctaattctggaatgggaaactaattcagcatctaaaccaagcatagcacaatgttcttcaatttcctttctggttaatggtctgaattgaccagatgctaaagcttccttcatatcaacttcagcaaccatcttggaatgtgattcaactaattcacctcttggtaaccatgcattatcaacagataacattggaacccatctttcagatttcataccaatgttttcacctaaagtgaaagaacattcatattcataagtgttcttgaactttcttctagcgtgaataccagcaattcttcttggagtaccttcaatcttgaagatcttgttcatagcttgttcatcattttcattaatttgtcttgaagctctatccatagtttctctatcttcaccagtttggaatctccattggatatattcagatggagtcttatctaaatgagaatcaatatgtgcgaaagcatgttgtttaatgtaagcaattctacaattttcatggacataaacttcaccagtagttggtaataattcaccagttaaaacattaattaaagtagatttaccagcaccatttggaccaataacagcaattctagatgataaagaacattggaagttaatgtcagaaatttgtggtttgttagtacctggatattggaaagacatattttgaactttaacaatagccttttgtttagtcttaacaccttctaagaaacctggttctgggaatctaaattcaacagttgaagcatctaaagcttcatatgaagcagcagctgggactctcttaatgaattcagataaattacccttatactttcttaatttgtaaccttcataatggataatgtattgaacagttctatctaagaaaccagaatcagtgggaaacagtaatggaagtaataccacaagtgtttaagtagttaactaaccaatcaacattgacaacatctaaatggttagttggttcatctaataataaaatatcagcattctttaaaacagcctttgctaaagctaatttcatcttccaaccaccagataaagcggaaattggtaagtctaacatttcttcggagaaaccgaattcagttaatttagctctaacagtttctctgtcaccagtatcaccttcagcaacaacataatcggaagtggaagtatcagcgtgagtaccatcaatatcatgttcaacgtaaatagttctacattcttcttgagttgggaaaccttcaacttgaccatttgcaatagctctcattaaagtagatttaccagcaccatttggaccacataaaccatatcttctacctctctttaatcttaattgagttttgtttaataaaatctttgcaccataagctaaggagaattcacagttacataaatcttcaccttcatcatcttcatcagcccaaactggtggttgtggaatgttatcaacagaggattttctgaattcttcaataatttcctttgattccttttcatgtaagaaaatagttaagaaaggagttaaaacagaactccatgaaagtggatcaatctttctttcatcaattaaattacctgcaatagcagcaacgtaagttttaacaacattgaatcttgctggtttatcagaaactaatttttctaaaatttctaaattgactttaatatcaccagcatgggagatagctggaatagaatcatcttctggaactgcaccaactcttcttaaagtgtttaatgctctttcagtaacagctcttgcttctggatctgcaataacatctaagttaccctttaatgctgggaataaatcttgcatgaatggagcaacaacttgtggatcatcgactaatttacacatgttatcaacaataacagcagcctttctcttaattgaagtatctctttcagctaaacctctggttaataatggagacataatagataaagcagcagtagtaacttcagaaacgaaagtagtagcacctaaagcatggacggtttctggaacttcctttggatttgcaatagaagcaattaattttggaatgaaaggttcaatatccttgttttgaacagttgcagtacaagtagtcatacatttagttgcagcattcttaacatcaactttagtatcccacatagcttcagataagactgggattaaatcagtcattcttaaagctaattgaaccttagcggtttcaacgaaaatttcaattgcagctaaaatagcaactttttcttgccattttgaagtggttgataatctgtcaataatttttggtaagatatccttaatagcaacaggagtaattgctttaactaaagcattaagagctttagttgcaacttctctgatagcagcatctttatcaccagttttttcacaaatagcaccagttaattcaacaatgtatggttcaacagatggagataaatcagaagcggaagcaatatgagcaacagcttctaaagcattgtaagcagtttttttgtcagagacagctttctttaattgttcaaagaattcaactggaacatcatgttcaataatttcaccattaaggaaagaagagacattagttgcagcagcatctaaattttcaggagttgcaacggacaatttgttgaaaagttcatttaaaacttcaacagattgttttgattcagcagcagcagacataatttgaatgtgtgatctgtgttaaaagaaacaaggtaaaatgaaaggcaaaaagaagttaaaaggagacagaagagaaaaggaaaaagggtaagtaatataacagtaaaaaaaaagttgggaaacgttgtccaatgtgaaaaaaaatgtgaaaaatttgaaaaatttgagtcgacaataaaaatttttcattttttcattttttcattttttcaatttctcttttctttttgttaactttttgacctgttttgtatggcagtcgcgtctgctactttttttttattattatttgtatgacactgcaaatgttgtggttgatctttatcatctgctcctatggtaggaagtattgattgaatgtatggttagtagttgtagtagtcactattgaataactgtatcgtgtagtttaaataggtattaacttataacacctttttgaaattataataactagcttttttcaataattattatctttttctaattttgacaagccacctaaaaagacaaaatcactgtttcacaaaactctttaaggactgaaaaataaccttttcagctgaaatatttcaatctagacaaatttggtatggtaattacaatcagttatcctaaatacagtgcaattgtactactattagtgttatactgtgtggttattagtataataaaagagctgaacacagaccaggcgaagaagaggcatttccgttaattaccgcattgggacacttatcaatatttaacatcagagttatcgattatttttaaaattcgatgagtgagactgattaagtagattaataactcagagcaggagactgttatcttctcttcaaagtcttatttaacctcgttatcttcctctttccaccgctagattctcaaggatatcaccttcttggaatcattaactattttacttatattttatcccactttcctttactttactatacctttatatattcacgtttcttttctaatcaattaaatttccatattctaaaaacaaaaaatacatacaccaatgcttgatttaacatccccactatttccattagaggaactatcacctaaaacttttgttaaattacctaaaactcctcatgctgaatcaaaatctgttaaattatatataattttagctgaacctcatttatttttagaaggttttacaaaggatgaagttatgtcaagacctccatcaattttaagaggttgtgtttttttaagaattacacatcctgttaaaattaaagaattatcattaaaattaagtggagtttcaagaactgaatggcctgaaggtataccaccaaagaaaactgaattatttgaaactaaaggtattataaatcatacttggccctttttcaattacttaaataattatccaatatcacataataaaagaaataatgctgatttatttataccgaagaacgattccgacgtttccgtattctcattggaaggttcacagaataataataataataataataataatataacaccagtttcatcatattcagatttaaaacctgttatgtcaccaactaatatattgaaatcttttagaagtcaaacaactttaagtcattcaaatcattcatctgatttaaattcaactctttcaaatggtggtaataataattcatctgatgataataaatatttcccaccaggtgattatgtttattcatttgaaatgccaatacaatcatcattaccagaatctgtttcagttacatttggttcaatatcttataatttagaagctcatttagagagaagtggtacatttaaatcaaatttaactgctaaacgtcctgttagtatagttcgtacaccatttgaaaattcaaatgaagaaaatgaaccaattataattgatagagattgggagaatagattacaatatgatatagttatttcatcaaaacaaattattttaaattcttatttaccaatttcatttagaatgattccattagaaaaaattaaaattcatagattaagagtttatataactgaacatttagaatattattgtcataataaaaaagttcatagaactgaaccaccaaagaaaattttattgttagaacataaaccaacagctccaagtgataatttattatcattaggtcatgatgaaattggtggagttgaattagatttccaagttttcatacctgaatattataatgaaaaatttcatttacatcctgatacaacaagtgaggatattcaatcccatcattggattaaaatttgtatcagaatatctaaatctgaaccaacacctgaagatccaaataaacgtaaacaatatgaattatcaattgattctccaatgcatatattaagttctcattgtgttcatgcaaatactttattaccatcatatgaggaacaagttaaaatagactcaatcaataatggttcaacaactgatagtaattctgttaagacattaacaccaaaacataattcagcatcaattattaaaagacaatcaattgataaaatgatgtcacctagagtcgattcaattctagatgctaatttatttaaacctgattcaagtgtaccaattgaaatgttatcacctcaggcaaaaccattttcaccaattgcatctccacaattaaatgcaattaatccagaattaagagagaatacatttagaggatttgatttatcaccaattatatcaccaatttcaattggtaatagatcaagatcaaattccaaagcaccaaatttaagaaatagagcaatttctccaatgatgagatcatcatcatcaattaatcaagttccagtagctgttagattaccatcatcgtcatcaattaatgaaccaccaccaccaccatttgttttacatcctccaacatatgccgaggctacagttgactctaataacaccaacaccaacagaaaagtacctaaacctaaacaaagaaggataactaattcatcagttgaatcatctcattctacaaattcaggcaattctaatggatcaggtaattcaggaatttatttaggaggtttgaattcttcatctactacatcgtcatcatctggaactacaaacaatacaaataataccaatacaaacaataataaacaacaaataaatacaccacaaccaagtactagaatatctcttaaattagcatcatcaatgaataatttatcaagattaggtaatttttcatcatcaggtacaggtacaacagctgtaagtatacctgatgaatcaactccatcaatttcatcatttttagattcaccaattccatcacatgaaccaataaataatcttaataatactaataataattcaactataagtatgaattcacgtggtagaaatcctgaaagaacgaaaggtagtacgaataataagacaattagtagggaacaatcaccatcatttgatttagcagaaaatacagatttaaagtttaagattacaccaattagaagtgcatcagcatcaccatttttaaaaccacataatgataatagatcaacatcaccaattagatcagcatcaccaataccaataattgcacaagatagaggattaaataaactgattaatgctacatttacaccaggatttacagttgataaaagtaaaaaagtaattgaggataataataatcatacaattgtttcaccattgattgaggttactaattctaatcataattctaatgatacaagatcaccaattttaacatcagatttagattctatattaattgcaccatgaggaacatgaaatggagacatcaagtataaatatcccactattcaatcatagtattaataacggagatagggatttagatgatgaactgattaattcggattcttcggatgaaattatatccaatgggaaattatcggataattataatttacattctaatacgattggatcaattaattcattagatttaatgttaagtaatcaaagttccaatacaatatcaaatatagttacaaggggtagtttaagtggaccaaccggaataaataatagaaatgaatcaatttcaggaggtatgtcattaaattatttaggtaatgaattaaatgatgatattgcaacagatataactaatatgagttttaataatagtaataattataataataatagaagtaattactcatcaagctctacatcaccaacctaaacacaatacatcatctacaactcaatccaacggtatcagttggacaaagctacgtaatccaaatttatagaacaataactaagaataaatgaaatgaagtaaaataaaatataaaataaaatatcgcaccatcccagtaattatttttctcgcagtctcttccctattgttctattcaatacatctgttgatagttaaccgttggatgttccgtcggagttgggtttgtgggaagtgattggaagtgattggaactatttggaagtattggaagaagttggaactttctctgaacttgtccctttccctctgaaccctgggatatccaatacgtatccaatgggataggagtataaccaacggtaatactctttacagtgacataattaattggtaatataaatgaaactacacatccctatatcatagtcaaccatcggatagtattagtttgtcagaagtggaaaataagctgataaattattattatactttagtggggacaattagaatattaattcgtttcaagttacccaccctccgggccccaacggttgcggtttttgtaatagtagtgtacttggcaaggttattgctataattatgatttatatcagtttttaagtgattcaattgtgtaattatgatgcgattagggatataattgtacgttaatgggattaactttctgggaattgcatgttatctttatctttctaaatttacttatcatttaaataagatcttgtatccccagtttcttttttttcttttttttcttattgaacttacttatttatttatttatatgaatcataaataatatagtatagtaatgagacaagtatttaatagaagaggtgcaatgagtaacagtaatttatcacatatacattcacgtaataaatctggacttttcactaaaattgatctagattctgcaattgatgatgaaatatcatatgaaattcaaaatgatataccaattcaagttaaagtaactacaattgaattaagtgatgatgaacttaatgaagtaactgaatttcaaaatattgataataataatgtgactaattgtaaatattcacatgttgatggttatgtaagttgttataaacctgatagaaatcgtttatatcaaacattcaccagctcaaatggaacgtatgcaaaattatatgaaaaataatttatcatctcaaaagagaaattttgaattagttaaatatttagaacatacagctcatattcatggtacgagtgtaccaataattattgaatcttggaaacaaaaaaaatatcataattggtggaatcattcaactacaagaactaaaaataaatatttagttgaattatctcaaatagagttatcttatctaaataatttattcaattaaacttcattcggtttaattgattataacgaatcattttatacatttactatactataccatactattccaaatatttgcatcaatttcacttctaacttttatataccacttaataatatattctaatttttataatttaattgtaaattatctttttttacaccaatcattaatcttattgacattatccagaaacaaacacgtaaaatgatctgatatataatttttccgtaatcaatagagaaaaacatgctctcatctaatgttagctttttatagccgtttattccattgacgaaagataaagttttcctattatttttgtcactttacaaattttcttaactgatcagattttggttttgtttcttatatacaactctagatcccttcatatattcatgatagacattccactgtatccttcacttccttttgctttttataatttctcttatttcctcttaccaaattacattgcccacacgatatacttaattcaactacttaaataaccaatatttatcaacttgctatcccgttagtccacctaactattaatttcctatttttttactcaattcattattctaaactgtgcaggaacataaagatttgaataaccaatttacccaaataggtaatttttcatttccaattacgtaagcatagcaaactttattatggttagctcttatttggacattgttttaataatcatcatattaaaagacaacatagaagtctagaagatgttaaaaatgatattaaaaaacagtaaaaattatctttattatacaaaaatattaaaaaaacaatatttattataaagattatagaattaaaattaaaagaacataaagaacaaaattaactaacaaagaaaggtattaaaataaaatggatagaaataaaaataaatttcaacaaaaagaataagaagatcaaatcatttcttctttttaaatctttgtaaacgattgagtattggtgatacaggattaattcttttaacacggaaaatataataaagaacaatcattgcaaaaaaattgaaaataatgtaaacacagaaaaatccaatatttctccaacgatcaccaaatgaaattccaatactttcaagatattgatcagcaactgaatatttacaaactgcacaattttcagttgcatttggattattaacataacctgtattatattcaaaatatggtgttaaatattctccacatgtcatattacttggaggttgtaaataattatattcttcaactgcacattcaactttcctatcatgtaatgtaatacttaataaatctgaaacaaaatatgtaagtggtgaaacacgccacataaatttccaaaatcctggcattaaatcaggtggttggaaaacaccacagaatgccattgtaaaactgaaaattcaatcccataataacatttgctgatggtaagtcaggtgatggataaagaattgctagtgctaatgatggataatataattgataaaagaaacaatatgtaaaccaccaaaaatcctgctctatctgctgatctatcaaattgaattgggaaataccaaccaacaaaataaattgttgaaaaaaatatacaatatggaatttcattaacatattgtgcaataagtaaacatgaccaatggaatgtattagattttgattcacgaacttcaaataattctcttgattgaattgcataagtttgaatttgattcataattggtgcactaacaactaatgtaaggaaagttgaaaacataacattttgcataccaacaattgtatgatttgccttccaaaatgaaaaacctgtaattaaagatgcaataacattcaagaaaaatttaggtaaaacataaggaacctgaacgatataattgataaaatgttcttttattaacttcataaaattgaaacatataaggagttgcaaattgttttttcaattcttcatcaacaacattttccttagatgaaccaatttcgactagttcttcaatttttttagtaacttcagcacattcattactttctaaccataattcatgccaatctttattaacggcagatgttgcacctgcaccaatcacttctaacatatattcagcaggattttcagatgttaaacattccctacatccacgactttcaaaataattcaataaagttcttgaattttcaccaatttcaccaaaatagacagtttgacctccacgtcttagtaataataaacgatcaaattgttcaaataaaattgctgatggttgatgaattgtacataaaattgcttgacctgcatttgctaattcttttcaaaacttgaacaattgcccatgaagattgtgaatctaaaccagaagttggttcatctaaaaataagtaataatgaaggtttagcaactaattcagttgcaattgataattttttacgttgttcaacatttaaaccataacctggaacacctgcaattgaatctgcataatcttccatatgtaaaatcttcataacagtttcaacataagcaattttttcttcatcaggtacacttcttggtcttcttaatcttgcactaaataataatgattctttaacagttaattctgcaatatgtaaatcttgttgttgaacataaccagttctacgttcaaatgattgatcaacaacatgaccattaacaaacatgtcaccggtaactacaccaacttcagttcttctggataaaacatttaataatgtagttttacctgcacctgattcaccaattaaagcagtaattgtaccaggtaaaacaaaaccttgaatattatctaataatttcttttcaccaccatcatatggaacaacataatcaacatttttccaacagaaaatatcatcagaacctaatttttggaaaacagattcaccagttgatgatgtaacttcaagtttttcattatctaatacagcctcattttcaatatctttttcaacactactattttcctcaacagattcagaattctcttcattatttttggttttatccttaacatcagctggggaaatttgtttgaaatgatcaatgattgcctttgaaactttagcatttttaataaataataatttatcagcacttgaaggtattggattataaatttcaacaacaattgcattaataattaaataaccgaaaatgaaaataaacataaatccaaaatttctccaacaatgaccaaatgaataaccataagctaatttaagataaatatcaccactaacatcatttataccatcatataaaattttagattcagctgcaccaacaaatccacaaacttgatttaataatggattaatattttgatataatggaccaaatggaattaaattatattcaaaacaaggcattcttaaatgacgaaattgcataaccatcattgcttcaaatgcatataaaattggatttgtataagagaaccatttgaaccaccaatacatattttttgtttgaagcatataagatgaataaattgtcataccaagcattgtaaatccacaaaatgccatagctgatgctaaatttggcattaatgatgaaaataatgtaaataatccactaactgccataacaattaaattagtcattaataagaattgaaagaaaggaccaggttcacgtttcatatttgataagaaatacataataattgtaaataaaataattgcaactaaacgaacaggtaattggaccaattgttttgcaattaattcagcagatggatgatacattgtataagcatattgtttatttaaaattggtttatcttcaaataaaacaggagtttcagctagtgtcataattgagaaataaagacatgcaaagaagataataccacctcttgtaaaagcaccaagtgttgaatgaggtatattataacctaatgaaccaatgattaaagattgaataacagaagcagaaatgaaagtaatggtataatttctattattataaatactttgaactcttcttttacaacaaatatttaattgagaaagataattcaatgtataaaaagatttatttggactacccttttgttttaaaactttagaaacttttctaatatcatcaaatgatttatcaggattataaattttaagtttgtcatcaattttaattcaataatttttgatattcaggagaatttttccaataattttcaaaatcatctgcattatatggaatatttttaatatcaataccaggtttaactgatctagcagttggatcagtaacagcagttaaaaattcacaactcgtttgtcttttttcctttttgaaacccattttttcaaaatattcaacagcttcattaattggaccaaaataaatttgtctaccaagatataaaactgtaacattatcaaataattgataaatgttttctgaagcttgataaattgtaacaattgaagtattcttagatgcatttgtaattgttcttaaattttgagcaaattcaaatgcagttgaagcatctaaacctcttgttgcattatcataacaaaaaactgaaccttcagaaaccattgattcagcaattgaaactcttttcctttcaccacctgaaatacctctaataaaatcattaccaactattgtcttttcaacatgttttaaaccaaataaaatttcatataaatttttcatattttcaatatattgagttcttgattcattatcaactctaacatttggagttttacaaccaattgcaaatgataaagtttgaccaacagttaaataagggaaatgaacatctaattctggattatagataagtaaatttttaaaattatgaaagaatttttttgaatcaataccattaaaagataataaaccatcagttctaatataagttttcttttcacctgataaaattttaagcattgttgaacaaccagcaccatggtctaccaagtactaaagtcattgtaccaggttcacaaatacctgttatatctttaataacatttctatgttttggtaattttgagaaatcaaacatttcatttttattttttttaaagaatttatcataacaaagagtaataggtttaaagaaaagatctgaaactatctaataaaactgaagctgaagtatttttaccaacaactgttaaatctttgaaaataactgtttgacttggctttaaagaattatgttcttcattataattaaacatatactctaaaattaattttaaatcgaaatcatttggatctaattggaaagtttccatttcatttgcattcattgaagccatattatttgataattcagataatttttgcataactgataaacttggatcatgagatgtaattgatcttgaaattgaaccagatactgtacgatttagttcttcataatattctgttgtaccaggttctggtacatttgcagaatcagacattatatgtgtgcttttagaagattacagagagaagatggtaataatagtaataattaagaaacagagtaataaaaagtcaagtcccaagttatgaaagagacatggttaagtataattatataaagtaaacaacatattgaaagtataaggatatgcccaaaccagataatttaataaaaattttcataaaacaggattaaactttggtaaccaagaggaaaaatgccaaaacaaaggaaaagcaaaaagtgtatttgaaagaaagtgggttgctctaatgcattattaatttgataatcatgatattgtacacttttaatttagtttccggggtaatgaaaatattagaaattaccgactgataaccgatatattagtatattacgtaatctgtattttaacttaaagatctatttatcttgttaccaagttcctctggagtcattgttaaatgtttcgataacttattctgtccactgattgcattgcagaacactttataactaggtattaatgtcttacgtatatcacttgctaattgtgtcttataaaaattaggtacatctgccttattccatctatcacataaaatttcaactgatttaaagaaatcatctaaaaatttacctgtatcctttggtgacatacttaattgacctccctgtttagtacttgctgccattaatttagctgttaattgtgaccatccactacctgctctatccattgctcttttctttaatctttcacatctctctaatcctctttgtcctaatacttgctttaatgtacttgatccatttaataatgtatacatactatcccaattaattaacatcatcataccaatattctcatcttcaattgatccattaatattattaccaactccacttccaattcttttacttgccttttcacctaatgaaaaaaatgaaatttctaatgcatctgcataaaatgatcctaataaaaatgctgaatcaattgcattagccttttcacgtataaatccattaggtaatattgatggtaaccatgatccttgatttaatccttcaataaatctaatttgttgttccttaaatgtagaaaatgtcttaattctagttgcatttaacataaatgtactatctaatcctaaatttgctataccaccattattaataccaccaccactaatttcatatctacttctaatatcctctagcatccatgcaaatgatcccttagattcattaatacatttcttattcatttcttctaatgtactaattgatccaatcttattttgtcccattctttgcatacttaaaacaacatctgaactaccatttgctaattcataaaacatactaataaatgctccctttcgtactgatataaaatccatacctttcttcaattcagcaatatatgattcaattatacctcttaatatacgtgaatatgctctctctccaatacctgatttttgtataattgaaatttccctatcatgtaatttcctaacgaaaacactatatttctcaaattcataatcctccattataaagataattttgatctccattaacaattggcaatttaggtatattcttcatcatctcttttctaattaaattagatctttcctttgctaattcatcagttatatcaattccacgatcattgaaaaatttaataattataggaatttcattaaccccattatctccttcacgtataccattaatagctaaattacgtaaatctgcttcactatcacttattgcagtcttcaacttcttctttcataccttcaaaccaactaacatctcgttgtaataattcaacatttttcaatgattcaattatatcaattgcacttattactagattttaattttttcaaagcaagtgaaacttttgatgcaacttctctaattgattcaacttccttttgcatattaagtaaattacgttccctaatacgtataattccaacttgtttaactaatggttcaatatttacaattgctttacgatttaatctagctaatgaagccattgatgtagctaattcattggataaactactaactgattgaatttgttcagccaatactgcttggtctaagatatcactatctgtaatctccattgctatgtctactctcctaaatataactataactcattctctaccacacacaccaactataaacttcatgtaaaaccctcattctaatcaacagttcctaccactcgcttaaccttccccattgggaaactttttttttcaccatatttttttctccatttaaaagaaacgctaatgtccactttaatgaatatttagatcaaggtacgttccttttgatcttctttcatttaaacagcctcattactcaacccatcatctacctatggtgtcgggttccatttccttggggctagatttatttgtgcctttttcgctaactctaggttcttttaccataaccttgcgtttgatagtagatgggcgtacatcttctttttaatttcttgtaatcaggttttatttttcttatatccttacacaatggtttacttaattaattaaatatcatatatgctacacaactctaggatattttctatcagtgtaatggaactgggaataatcctatattagctaaatctgacatactccattcaattgcattttcagtcttccaagtccaatagaaaaatccattagtttgattgtaaatatctaattgtgcttcaattatacgacgtgtattaactttatcttcagctgtcatcttggtaaaatcattactaaatctacattgtccaataactcctgtacctgcaaatgaattatcatatcttgcacctctaccaacaccatttaaccatttacaacaatcagttaatgcagctgaccattctccaacaatttgaatttttggtaaccttaaaaattctcctactaataatttaattgatgtaatatgtccatcaatactctctcttaattgtgttggatcgaaaacttcatatctatgatgatctaaaactgtatctttatattctggttcattcataaaatttgaccaaaatggtgctggtaaaaaggcatcatgataaacaaaccaattattacttcctctctctgaaacatcttataatgttgtttgatcaaattcaatgattttaggtatttcatatctatcatgtaatggttcatttaaattttgatatccaattataacatcctcatattcaactccaccatatttagtcataaatatattgtaaaacttttaaacctaattcataattagttggattcatccattgataaacatccctttgacctgaattatcaaaaccattttgtgaacctggaataccatgtaaatcaacccataattttaatccatgagctctacaccaattaattgcctttatcaaatattcttcttgacctgaaacataaggatcatcagctaatttagcaaatgcccaatatccaataggtaatctaactgcattaaatccatatgatttaattctaataaaatcagcttcagtaatccatgtatcccaatgttttcttaatcttgcaagtgcttcattaggtcctaacgatttacagaaattgtattcatcaataggtgtccttgcctcagatccatcaactgatgcttgttcatataatgatggactaataaaaggctcagtaaccaaccaaccaccaaggttcacaccattgattttttgtgttctataatcaaatttcccagatgtaactggcggatttggtgctggaactggagttgaaacaggatttgatacattcaaatcatcattcacatcatcttgctcctcatcctcatcatcctcattgtcatcctcatcatcatcatcagcaaataactttccatattcatcataagcttcatcatcttcatcatcaatgtcaacatcagtatccatatcataataatcatcattttcatcatcttcaacttcagagtcttgaaaatgaaattcaaaagtatcatttaatcccttattcaagtatgaaaaatcatctttatgaccctcaacatcatcttgcttttccaatgtcttcaagaccaagagttgtggtgttagagtactgtgcataatctacaggaatcacgattgtggaactcaaattgaaattgatcagatttattactataaaattctaacatttgaggagaatacaatacattttgtttttgttcgaaggaatataccttaccatgtaacatcccaaaaaggacggcacatgtgagatatacgtgcatagcaaagttgttttaatatcaagataaaagtgataaaagatgaggtaaaagcaggaagaaatggggataagtattacttgattaagatagcagattttatatataataatataaataccttcccaatgcggtaattttgattttcctttttctcattaaattttttttgattcattgaatgatcattcatggcaagctggattccattcttttgtcatacgacaagaaacaatgattccatctaacatactcaacatattcacaaatacagaaccatcagacatttcatacaaggaagaatgtttgacatgtcaaataatgggttctgcaacttgtcttgtggctggtgcttatttcatgtcaaatttaccattttcaggttcaaatacatcagttaagagaaatccagtttggtggaaaaattcagttaaaggtgcaggtgcaatcatttttacacttggtatacttcgtggtggtgaaggttggttatggaatcaagaaaaatatttaacaagtgaatcaaaatgaaaagttgaacgatgaaaatttatttcttttctattagtttttacaaaatttactgtacataatatatgtgtattctatagacattaaaaaaaggcataatgttgatgatcagaagatataatcattgggaaatagtgtttaggatagtaaaaatgttttaccactactattaccaccaactatccaattttcagttggatggaaacaacaaacagctggaactgaggtcatacgttcatcatttatatgtgcaagcatagttccctctctactataaacatcaagacttttcttcatattggcaataacgaatttttcaacaccatctcttggtctttcatgccatctagattttaaaattgaaacccatcttccagattgacaattatgcttgatagtaacatcagcggttaagttttcatttatatcaccagtttcaggtttagcaagcgtggaaagataattcataataccatcacctttattcatattaaagatacgtattgaatcatcataaccattacaaacaatatcaccagatctattccaatcagtacaactaacacttaatctacttccatatgctgcaacacattgaggtcctttaacatcttcataaccagaccaagacttgatcatgtatatttcttaaatcccaaattctcatagttctatccaaacttgcagatgcaattaatttatcatcagtgggacacacagaaaaataaccaattttcttatcatgtaatctataatttgaaacacatgcatctcttctaactggatcacttactcttaaatcaaatattgagaattcaccctgtaatgttgttaaataaccaatatttttatcaataaatttaaaatcagagatacctgatgcatccccccattgatcatcatattcaacaatacattttgatatatttttcgttaaatccattgtccttatagatccatcatatgatgaagctaacaacttcttctaaaacttcaggacgaacacatattcttgcaatatttttcctatgtggagtaaaacgtataatagctggttcatcatctgaatcatcatcaacggtccaaacaccaagcataccattagtatcacctccaaatactaatttacgattatttgaaggatgaaattcaatagttgtcattctagaatttgttaacatgatttgattaggatggaaactttcatataattctaatttatctaattcatctcttgcttgttcatcacttttctgtgccaaaggtttattcttaatttcttcaaagaaatcacccatagagaatgatttacctaatgtttctaacattttagtatcacttataacttcagataattttagatcatcacttaatctaaccgattctaattcctttaatttttcttgtttaattttctcttcatctaatgcatctaatactttaacagcctctgaatcatctaaattaacacctgcaattcttcttgaacgacgtaatggtaaatggtgcctctttctcaattttaactgttggtttacgcgtctttggtttaggtttaggttccggacttgaattaccactctctgatttcccaaattcatttgctaactgtgttaaattgagttgtctcaaaagctccttattacgagcaatattcgcttgtctttgtttctcaaattcagagatagccattgcctttgctgaacttgttaatttctaaatcatcaatggctaatccaatataactgaatgaaaagtgttgatatgaataagtacgcgtaagcaacaaaatttttttgaatccacgaagtcgcgactatttctatttgtattatttgaattacgtaattacatgaaaattgttatgccttcttgtaaaacttgttgatgtttcaaaaataaagagatggatgaaagatattctttgagtagataactgggtaggatacaattattggcactagagaatgtccgggaaacctcatcgtacaaaatcccggccatcggccaaaacaagggtgagaaaaatagatgcagatttattatcatctcaatatttacaatcacaatcacaatcacaattacaacaacgaacgccggtacgtaaaaatgctactttgaaagcaatggtttcacaagatcaaacaattttctcacctgttaaaggaaatgatgatgttgaagaggtaaatgattatgataatgagggagaagaagtaggatcagattcaggatcagattcaggatcagattcaagttccgaggaaaatgatgtgatagagattgaatcatctgatattgaagaagtttctgattctgaaagtaataagaaaagatcaaatgatgaattaattgaatctgataaacccaaaaaagtgaaaaaattgacgaattataatgttccattaaatactaaaaattggcaacagttaccaccacaagttcattcagaattatcaacattactgcatttattgataccaccgtctttggacaacgctggttttcaaaaatattctcaagtacttcaatcggagattattgaaccaattatcaagaaattttcaacagtttatttaccacctgtacacaaaaatacacagcgaatactaaataccagtcgtacaagtggtgactttaacttaacaacattacatgatgatcaaaccagactcacatctgcatatgatattaattcaaagcagcttgatatgctggcattacaattatccaaggaaagggaaatgttagcaactgagaagaaatatctttctcaattaaaggagaaatcaaaactttggcaacgaagaaaagctaatagattatcaagaatggagaatcaacttggacccaagttttcaactcttagtaatttattagatttaaggaaaagtggtgccaatggagcagatgatattgatctagtcactcatgaaaacattctgcgagatattgaaagtgataatgattctcaaagcgaagatgaaacagacagtggagatgaagcagtgaatgctgctctcagacggttaaataacaaattagatgatatacaatcaaacaatgaagagtctcataaactacacaattctttgatgagtttatatcagaaattgcaagaataaaattcatgcatgtaaaaatattatattatgtacaataattagaattaaatgtataatacaagaagaataatatagattgctaactaattcataaatgcatagagaggtaattgttctaaaataataggagtttcaagctcttttacatgaatatcatttacctttccatcgtaataattatttaacattacacctgccatcattggaggaattgacttatcaatagttccaatagttatatgagtgtatctgttacctactggtaattcaatctgctcatcacctttattaaatctcatcacatccgcctcaatacacattactttgttgttccagaaaatttttgtagctttaactgttgcattatattcttcacctataaagtgcctgttattcggtggaagattttccgtcattttactgaattcttcaacttgatttttgaattcatcattatacgttttccacattaatcttttctcatctccttcccttctcatggctgaatgtactaaagttatatgaaagtctttctgtacacgttttttctcttttaatgtggtaaaaaaatcaatgttattagattctataatcgatagaacgttttcagatggaacatggattccaaaataattgggttttagtttgtttattttcatctttttggtaaacacaggtttataatttttagcattttcaaaagcttcttgaaatctttcctttgttggagttggtaattcaacatccttcatgattttttgaagtttactaaccaataactccatatttttcaaacttgaatctttctcagaaacatctaaatcaattatataatcaaatttagaatctggttctttacttggctcaactttttggaatcgacttataaaacctctcataattttctcagcattgacaataccatcagtttctactttaatagattgatgatcatcacctctttcaacaactctatttcttgtcaattcccataaagtggtatccttttttggagaacttgattgaatgaaattcaaacaaatgaattttaatttggattttggaattgtatcattgagtttttcaattgaatcaaaaatttgctttctctctgcaaacttatggttattcttgtcaattatcacaattggtttttccttcaaaacatctaatgcggcaacaactaatttatccttaccaggagtttgtatattatcattttgaacatgtccaataagttcaggaaacaaattcattaaaccaacagaggtggtagttttaccacatcctattgttgcaacagttactaaaacatatcttttcgactttgtttcaccgaatttcaatttcttcatctcatcctctaaatctaacatctttaattcatcagagataagtttcattgttgattcattcttagattcaaaatattttttccttaactctataattcgtttattatccaaataatcagatttgagtttttcatcagtaactaaatatggcatcacaaatttaatataatccatacagatcaatttatgtttaccaaatttaatagactcaggtcctgtattaataaattgtttagtaacttctcttagttctctatataaaagatatggttcttgaaatttaaatttgaagaaaaaatctgtcaatttatcagtatcagggattggttttctacaacgtataacaaaaccttcaatttcttcatcttgaaaagttccagtttcattacatttttccattaatgccagtgtttcatcaaacgtatcacatactatatattttgtttctttgaatgcaaattgttgagcaaattggttaactttatccattggatatgtgttgaattcaactgtatttaaatttaaaccatgtaggtacaatccagctttatcatttttatattcaagaacatgttcctcaaaatcatcatcacaatattcacaaactgcagtaattttatatttgaatagtatcaatgctaaatcttttgaggataatgaatttcgttctaattgacgttccagtgctttttgagctgttaatgcatgatttttagataaatcatctcgtataccagttgaatgtttagaacaaacaaccagagttccatcagaaagtccagatacaaaaacaatacacccattacttttaacagtaacagtgtatggaccaacagtatcacttcttaaagtttcttccttcactgattgaagttcattaatattgaagaatttatcataaccacgacaaacaatatctccattaatatctgtaaacaatccacgagcattggatggtaacttaactttcttactatagtagtcccattcattaaatcgccaactgtatagttttacatcagtcccatatacagtattttctattctcttaatattggttttcccattgtctgaactgactaaatcttgtaatgttttgaaaagtttgtgagattcatccctttgatgagccaacgtctcctctgataacgttataggttcaaacatagtgtttcgtatagttctagaaagaaaaaagggtgccttagaaacagttaaaaaactggcatggataattcatcactatagaaaaaaaacactacgaagaaggaggctcagggtttctacttttttcatctcttataggtacaaggaaggtaagtctttaatactgtatgaagtctatttatatgatctaataatctaataatctaattaatgagagagttgatttcagtatcattgtatccaaagatgtacaatgcatcctttaaagagtcagagttcaaacgacatggagcttctaattgaacttttggctttgcattccatgcaataccataaccagccttatgcatcataagtaaatcatttgcaccatcaccaacagcaacagttttatttaaatcaacattattttcaccagctaattgaacaagtaaatctcttttacgtgcaccatcgacaatatcaccaattgtttcaccacttaacctttcaacaccatcaacggtttcagttttaagtaaattagcaaatgcataatcaagatttaattgttccttaacatattcagcaagtggtaaaaatccacctgagcaaacagctaacttacatccagattttttcaaaactttacataattctttggtacctggagttaattgaatttgaggtttaaggtcatcccaaagagtttgtgacttaataccttttaataatgcaacgcgagctgcaagtgattgtttgaaatcaagcttcaccattcattgctctagttgtaatttctgcaacttgttcctcaacatccgcttgtgctgcaattaattcaataacttcttgttgaattaaagttgaatccatatcaaatacaactaaacctttatttttacgattttcatcatttttttggaaaataagatcaacatttgaaagattgatttctttaatttgatttaatatatcagtttcaacagtttcaatagttggaatatttggatggaaatttgttaaatcaatatccacgtggaaatcagttgcttttaattgtgataaaacagtaaatgaagtcatccttattggaagttttttcaaaatttcagatatttcagcattatcattatctgaaaattgtcccttcttagcaatagcggtaagtacgtaactcattagcgttgtttggataataaaaagtgttcaatgctgataagtggaatcagtaatggaaaagtaaattaaatttctcgataatgaaaattgacattgaaaaaaaattgacttcaacagttttatgacatgcatgtccaaaggaagaagaaggagtgtgtttctataactaaccatcaatggatccattacctacatcaacggatacaactggacttttcacctgccatgtttggtggtgcatgttgcagggtattgttcaaacatcattaacgtatccattagaatattttaaaacaatttcacaaattgagaataaatcaattatgcttaaggaaggtattgtaccacatgattcaatgagaccattatttacaggttgtttaccattaagtataggtatggcaattaagaatgcatcaagaatgtttatatttaatggattttcaaattttatgtcagatagtaataaaactaatgcaccacaagttgttgttgcaggtttaatgacaggtatgattgaatcaatttgggctataccatttgaaaatattaaagttagaatgattgaaaattcaatgattaaatatgggtatcgtacaaaatatgatgaagatgcagttgaaactaagaagtcaaacagtggtaatagtacaagaataagtaatagacctgaaattaaacaaacagctagatcaatggcacaagattttatgaatgaaccaagaatgaaagcaattttatattatcataataatccatcaactaattttaaaggtatattgaaggaaatgtattcaactggtggtatattatcatttacacaaggttcaagtataacattattacgtcaatgtatgaatagtatggtttggtatagtacatattcaacaatgagacaaatgattgatccaagtcgagattcaattagtgaattagaattattaggtatgggatttgcatcatcattagcagttattggtataacacaaccaattgatgttattaaaactagaatgcaatcaagggattatagaattatttataaagatatgatgacatgtattgtactgatatttttcaaagaaggtgcaagtaaattttggtcaggttcagtacctagatttgttaaaattagttgttcatcaactgtaactttaggtacttatgaatatgttacaaaagctgtaaataaattatctgaaattaaaccatttgcaccgtaggtatagtattttaggatataatatataaagatataaagtgtataagtacacagtaaatttttttttatttaattacttataattaatttagcaggtttaatacccattaaagcattcattaataaaacatattcaccatcctttaaatgacgagttggtacaataccttgaataatttgaccattatctaataacatttttcttacaactgaatccatacaacctaaacctaaatgaggtgttatccatttataaacaacttcaccagttttagaatctttaatttgtctccaaaatgcaacacttgaaattgtaccttcagttacattatcattattatcaatcattaaaacttctctattatcacctggaattatattaaatctttcccttgctttattaaaagtatctctccttgttgttttaaaagaagtaaatggtgattgaatactaatttctttatcaagataaatttcccaacctgtccaatctcttaaatattgaggtattgaatcattacctttttgaatttgggaataatcaggtatttcagttgataattgatgagatgaaggtaaaggagcaaaatctatttgatattcaccatcatttgaaataaatacacgtactctattagcaattgatttatttgcattttgtaatgcaagtgataaatgatgtaataaaatatttttatttaatgatttaacagggaaaccaaaataattaccagctcttttcaatctaccaacatgttcatctaaaagaaagaaaaatgattcatctaaaggtatcatatcaattgctcttggtatatcatctggagaacctttataaatcagtggatcaaatctaattgttgaaaaaatttggaaattttcatttgaaaatgctaattcagattcacttgttggaggtgatgataaatttgaagaattaagaatttctaattctggttcaatatctaaatccgtatttgtttcaaaatcagatgatgataatggtgaatttattgaatttttagtaggaaaattagggaatgtataaggttgagtaaggtaatctttacgtaatttctcagcaagaatttcaagttcctcttcagtgtatatttccattatgaatatatcatccattaaatgataaaggaaagaaagaagttaatgaaagataagaaaagacaacaaaagacaagaaagttaataaaagcaatttatgctaatttaagcgaaatgccggattttaaaaatttaattaaccggactcggactttatctccactatgatgatgatgatgatgattattcaatggttactagtgaagtatatgtattgggagtatacaatacactgaatagtaaatcagtaggataataactaagtaactaagtattagaatatataaattatatagttgatttaataatttcaagtatttcattaaaatctttaaattccctatatttaacattatctctttgacaaatactaattaaatcacaaccttttttagctaataaaatatcacaacttctagcagctgaaatatcacttacaccatcacctgaataaattaatggtcttttactatcattccaattattaattatattaataatactttgatttttatcatgaccaaatgatgtatcatctctatatttaatttcccatgtaccatcattatcattaattttaacatcatttgcaattatttgtatataattacgtaaattatcattcaggtaataataattgtaataattcttttataactaatgacataccacttgaaactattataacaggtatattattttgataacaatattcaacagttggtttaaaacctggatctaatttaatatgatttttaagataattaatacaatcatatatagaatgattattatttgaaactgattttaacattttatcaaatgcaattctgaaagatgtttcattattgaaaatttcattattaagtacaagtcttgaatttttacccattccaagatcatcatgtcagtaaatcattacaatcttgaagtgtaacagtaccatcccagtcagtaaataatgccattgtttagttaaagaaagaaagttaagaaaagtaggctatatgaaagatcaattatagatacacgccttttttaaagcttctacagccacgtaatcataataataataataataataataatgaagtttataatatgatcttctttacacatcatacaatgaaggtagttgtaatttcaggtggtacagcaactaataatataattgaagaatttttaccaagtaataaagatgataaattaacatttattttaccagttagtgataatggagggtcaagtggtgaattacagagaattttcggaggtttttcgattggtgatattagatcaaggttagtaagattaatgtccaatgagtcgatacaagagatattaatgcatagattaagtaatgatgaaatagaggcaaggaaagaatgggagaggataataaatgatagtgaaattgatattattattagaagttttctaaattttatggatgttcaaatagaatggtagtgatatgaaattagctagggcaagtattggtaatatgtttttatttggatgtaagatgattatgggtatgaaagaagcaattgaattaatgaataaaattggatggtataccaaataatatacatgtttatggatgtacatatgaagatgttaatatttatgctaagttagcaaatggtaaaagttattattggacaaagtgagatatcacatccagttgaatgggaattcccaattaatgattgataaagaatgtgaaattccattagagagtccaataaaggaagttgggtatgtaaaagaaggggagggggagggatgataatgactgataaatttgctaatgatgagacaattacaggcaattgaagaagcggatactattgtttatagtattggatcattatggacatcaattgtaccagttttaataacctaagggtataagtgaaaggattagaagagatcaaagaaagatattattagttaatggatggccagatagagagaccagtggtatgaatagagaagattataagaatactatagcacaagcacttgataaaagagtagatgaatgtatagacatagttgtagatccactgattgagagtatcagaggcagtatttataataataaccctcaataaagagaaaaccctcgctttctcactataaaagaaaagctttttcccacttatgtcttattcttagagactacttgcaggtaacgcaaaataacacgacaaatctactatgtgtccattcgaggcccctagggaggcccaagacaataggacgggttgtatcttctacttgtagtatcttctatttgtaggagatattgtcggagagaatagtgaacggatcttgggtgcagctagtgacaaacagtcttcgtactgactgatggacataggtgcaaggatacgttgtacatatagtaatattaatagtaagtaatagtaatagtaatattaatagtaatagtaagtagccttatattaacaatagaaaagtaaaaatttcaccccctctttactttgttgtggggtatatatgacagtgcgtattaataatgactgattatgattatgattatgattatctcatgataattatatcttcttttgaataatcttctggagataacttatttctttgctaatcttatataatatactatactatactatactactatactatactatactatactactatgatataccctttaatacgtttacattcgaatataaatataattaataatatacgctatatacgtcgattatcaactatatcactaaaacctgtatcaaatttaaagcaaagacaatctccaacttatgcaggtcattcaaattcaattgttaaatctttaatttggtcaactcctccaaataatatcttaatagttaaaaaaccttggcattcaaaagttttagatgcaactttacaatttatacatcatttacataataattatccttctgttaatataattgtcgtacctgaagttgcagaggaattaaattcattatctgaatctaataatactaataatactgaatcaaatacctatttatacaggtcctgttaatgaaattattactagaactgaccttttagtttctcttggtggtgatggtacaattttacgtggtgtttcattattctcaaatacaactgtacctccagttttatcattctcattaggtacattaggattccttttaccctttgattttaatcatcatgcacaagcttttaaacaagttttcgaatcaagatcaagtatacttaaaagagaaagaattgaatgtcatatagttaaatcaaatcatcatattgattcccctgttatttatcaaaatactaatcaattaaatacaaaggaggaagttgatcgtcttaaaagattatcagctgcaatgaatgctccttttgataaattaactgttacttctgaattagaatctttgaaaaaagttaaaattcatgcaatgaatgatattgtacttcatagaggttcattacctggtttattaagtcttgatgtttatattaatggtcatttcttaactagaacaacctgctgatggtttaatatttgcaactccaactggttcaactgcttattcattatcttcaggtggttcaattattcatccagttgttcaatgtattttattaactccaatttgtcctcgttcattatcttttagacctctcgttttaccattaaattctcatatcttaattaaagttattggtaaggaaaatgttaaaattgattatcaaaaattaaatgcaaaattaagtattgatggtatacctcaagtaactttaatgccaaatgatgaaattcatataattagtgaatcatcttcaagattaattgatgataatgaaattgatgataatgaaattgatcaaaatattcatgataatcatgataatcatcacaatgataaatgtacaaaaagtattaaaaaattagataaatctggtgtttggtgtgtcgttcaatcaaagggtgattgggttaatggtataaatagtatgttaggttttaatttaggttttaaaagtacaaaaaactataatattgataataatgataatgatggaaaatcagagtaaacttctatatataatatattatttaaaaaaacattatataatatcacccttagttttaacaatatcttcatcatgatcataaaattcattatcgggtacaattcttgcatcccttttcattaatgaaccacctcttgtatcaattgaattcttttcatcttcattaatatcatcttcaaaatcaattatatcccttggtgtatcttgcatttgaacacttggtgcatgttttgcattttctaaattagtgaaaatttgtgtcataattctatttaaatattcaggtgtatttgcattatgcatattacttggtttaacatctaatttataatccggtccataatattcaaaataatcattaaatggtaattcaggacctaaaattttttgatttaataaacctgtctcaaatgtccatgtacgtgaaacatttctcattgtatatcctcctccacctaaaatcattaatggtaatccaaatgatttaatataattaatacaatttgcatgacctttcatacttaaattaaaacaacctaatctatcacctgataatgaatctccaccacattggaaaacaattgcacttggttgataccaatcaataattcttttcattacaggttcaaataaatttttatatgtttgatcatcaattccatcacgtaatggtacattaattgaatgatatttacccttaccaactccaatatcccttaattctcctgtacctgggaaaaattcaccatatttatgaaatgaaactgtcataactctatcagttgtataaaatgcttcttcaactccatcaccatgatgaacatcaatatcaatatataaaactcttggatgatatcttaataattcaacaatacctaaaacaatatcattaacataacaaaatccacttgcttcacttttttttgcatgatgtaaaccacctgcataattaattgcaatatcacatttaccacgattaagtcttgctgcaccttccattgatccacctccactaattgaacaatattcaaataatccatcgaaaactggacaatcatctccaacattaaattttaattgttctttattaaacatatctaaattatcaggtgtaactctagcaaggaaatcaacatattcatctgtatgaaattgtgtcatttcttgtcttgttgcaggttttgcacgataaatttccattgatttatgtaatccataattcattataagtgaatgtgccattctaatacgatgtggtttcattggatgtgcatgatccatatgaataattaccaacatcactatcataaaaatatgcaattcttttcttatcttgaggattaacagtaatctctccaaatggtttatcttcatataacattactagtttgtttgtttgctatgaagaattaatgaaagaaaacaaagtggaaatcagttaagataaaaaaatattgagattgtaattgatttagtgggaaaccatttactgccatggtttttttttttcaaccttagttttgttagatttactttattttcatggtatttatttatttacagaatatacattatatataacaatagtaataacaatagtaataacaacctattataccctactaaactctccagataatctggcaattaaatcttgccccctatcattatcaaataatatacctccattaatatcattctgtaatccaattggtaaccaagttagtaatccaaatttcataactgaatgccaattatttttccaacctaaatcaaatggattatcaaatctacgatgtctatacctttgtttctcatattgttcaatagttgttctattagttaataaattataaattgtaaatcctgtaaatcctaataatgataatccgaaaacaaatcctaaaattgcaacaaacataacattaattgaaatcataccattctctaattgtttccaaatataccaactacttaaaatccctactaatattgaataaattgttgaataaattaaaaattgaaaaaaaaatctatgattcttatatccaatacatgtaccaaaccatggacaatgatgatccatacgtaaaatacatttatcacatccactacaatgatgacatctatcaggtttccaaactttacatttattgcaaaatcttgcattaccatcagatttaatagtaacccattgtaatgatattggaggtggtattaatgaatcaatatcatttggtataagttcagggaaatctaatggtgatccaggtccaattaaaataactctccaataacaagttattgttaatattactaaaaatgtacttattataatgaaaattccacctactatcccacttttttcagctaaaaatattgttaaatctcctgcaactacactccatgtccatattagcaaaactgtcacaaatgtcccagggacagctgtgctccacattgtttcataaagaaaaatggcttataaattgtatgcttaaatcctgtactccttaataaagctttaatattatattatccacttacgtaataatatatatgctatacattataaaaccattttaaaacactacgaatgaatgcattgacaacaaattcaagtcctaaagtactcttaactccaactacttccatctcctgataattctagtaatctttccagtgtaattttccaaattgatgtacccttagtaacagtaattgaaccccaaccacctctttcacatgaaattgtaatatgaccatcacctgaaactataactccatgattaacaagtgatttaacacttaattttttaccttgaattatctttcttccacttactttgtcttttcaataatttttttaataaaacttcttttcaatggttcttgatcatttgaagtttcttgaataattttagaatttaattcaattctaatactatcacaatattcatcatatcttcgttttaatgttgtactacgttgacgtaattcagttactatatcaacaactatatccttctccttttcccttgcttcttcaattgcacgtctttctctgatatcattggctaaactttgaacaattgtagcatatccatcattagaatcaacgattcctcgtctctctaattcaaaaatcatttctaatgtatgttttttagcttgtggtaaacttatattagataattccttcattatcacgtacaagttgttgaaataataattcatcagctggtaacatttcactgactaatacttcaactaaatcttgtccattttgaacttgtaaaatatatattaaatatttcttaatttcatattttaatgtatctatgacaattctctccatttcttcttcactatctttgacaatcaatattttgctatatccgtatgaatcatattcaagtcttttcttcaatgaaataccaccaaaatcactctctctcatttcagttaatgtataatacattataccaccattaattttttcttcaatgaaaatctcttcaacaaaatcttgccaaattccaattaattcaataacatcatcagcttgaatacgaataaattcttcacctgaaattaaaatttctcgttgataacttacatctaagtttgaaacattgattatttcattaactaaatctttcatttcatctctaatttcatcaatgaaaccatttaaacttgttagatatttttgagttttattattaaaatgtctcatactaccacatttttcaataacttcggaaactaattgtaaatttctagtaactctttcaacaactgataattcatcactaactgcgaaaacatcaattgaataatttgcaggttgaacaaatattggtaatacataacatttcatgaaaatacttaaaaccatactttttatataatcatcagaaacattgagttgtttattcatagtttcataaaattctttcattaaacatttgataaaatttggaatttcatgaatttttttcttaatattttcaataattaagtaactaatatcacgtaaattttgcatgttttgaacatattgggctgaaacttcattaatatcaaatggttcaatatttccaacttcaacatttatcttatcatcattattgattactccatcttcaactaattttgtgaaaataacattaggatcacattcataatttatttcatcatcacttgtaattaaaaatacacaatcacctaatatttccttagtggaattttctttgttgtggtaaatttaaatatgcatgtaacaataattcccaatatttaatattccccgcctcattacgacctttaaccattttcttaaaatcttcttcattgagtctgttcaaaaataaggtgaatgttgaaacaaccaatttcataaataagtattcctccttagttggttcaatattactcatttcatcaacatcattatatccgaaacatttcaaaatccaatcttcaatattaccgtatgaaaattcaacaatatcatcactcatttcaatataatttaaaactcttgaccaatattcaggtttactttgtaaaatataaaagaatgtacctaaacatttatccaatgtattatccttatgtttacttgtctttaaatcatctaattcaggtatttcaacatcaaccaattcacgtaaaactgcagttccattatcaacattgctctttaatccacctgatacattctttaaatcaattccaaattttttcaatgtttcaaccttaacctttaaatcacgtaatttatcaatttgcttttgaacatttcccttttccttgctaatttctttctttaattggacaatttccttaccactttcagatttatcacttttacctaaaacactaataaatttacaaactgcacgtaatggtggatcttccttcttaattaatgccttataatcttgaactccatggaaacctctaatagctgcttgtaatgtacatattttacgtacattttcaggttttctaaaccattcatcacgttctctgaatttttttacgtgtttgacaaccacgaattatactttgtaatgcaattactgaatttctttcatcatctaaatcctcttttaaaatatcgtaatcaacttgaacttcaacagctctcaataaactttggattgtgataatttcattttgattattcttcaagttatttcttagttcaaaatatgctttccttgtcaaaccaccacgaatatgtgcggtaaaactactaaaaattggttcattatcataaatttgatcaatcatattgtttaatcttttacgtgtcaaaacacctctaccaatagattgtaattttgtaatctctggagtgtaaatttcatcaatttcagggtaattctcttcatcactttgataatcatcttcttgaataaatttatttaggccgactttagttggtgaatgttgtaatcttgatattgatctattttgttgtcgtggtggagtatttggaggagttgttgctgatgttattggtaaattaggagtataatgtgcatttgcttgttttgcaactaatcttcttggaacatgacctggaggaggtaatatgtatggttcttgtttttgtcttgggatatcaaatctttcaaatagttcatcttcatcatatggagcttgtaatggattttctgtagtagaacaagacttattgacatttaattttttgatagttttgattgttttgattttagatttttgtttaaaattattgatcctagaaggttttttaccattgattatatattcacgggtttgtaatccacgaattaaactttgtaatctaataataatattcatctcatgtaaaagagatttcctaatattccaatatttatctctaaccaagaaacctttcatatgagattgtaattgaattatttcattaatatttttatttaattcatttacattttcattcattttcatttctctatgtttctcacgtaaaattcttgacattttattcgatatatctaattcattaaatgatttttccttcttcaaaagttttttacctttatttctttgaagtttaccacgacataatgcttggaaagaaataattgaacttgtattaccctttaaaatagcctttgtaacaaataaatcatatcttagtaagaaacctctagctaaggattgaaattgaattaatgcagtattaggatcaagggtactaattgataaatctttgatactaatggacttaacaattgtactttgacctaataattctctctcttcttcatcaattaaatatctatattttttctcaattgctgataatgaatgtattgaaggcatacttggaattggattattaaataataatcttgcatctctgattgtttcttgttcttctgaattcggaggaatatgtggttcattctctggtgttgaaggttgtgttaaatctaaatccagatcaatatcagataatgaattatcatcacttattgttaaaaatgagaattcattgtcattagtttcatttatttcctcttctttaatttctttggtttcttcaatttcttcaattttctctactacttcaggtttttcttcctttttgacttgtttcttagcctcaatttgaactaattgaagtctctttatatcatcacccacattaacacgtactgcctcttcgaaaccttcaacgtattttcttcctaatgtaccacgaccaattttatgtttaatttgctttaaacactccacattaatattagatgaacttaatacagttgatatattttgatcatcagttaaacaaacaactgggtctgccttacctaacattgacattaaacaacttaaagcatgtaaacatgcaataacttttggtatatcttttttttcatataaatcattagtttcaaagatgaataaggatggtaatttaacggaacgtgtgaaaactaagaatttcataatattttcagtatatttaaattgtttattgatcattttatattcatctggattatagattttattaattgaatgatcaaaatgttgagcaattttagcaattaagacaccatttgttaaataatccgggaattgatcaatatttgaatcatttaaaccgattgatatattaagtaaattttctatccattgtttaatttctaacatacgacaaacaaaagttgcgaagttttatattatctctatcattatctaaccatgttttaatagctattgatgaaggtgatgttaattgtttattaattttctttgtgctaaaagttctaggtaatgatggttttaatggggcagttgtagttttgttatgattagtaggaactaaaattgattgaatatttttcaatttatttaagtttttagaagatggggaattagacataacagtatttataacacccattctatttatttcactctttgataatttatcctgtattggttctaatttttgagtaacgaaaacacttttacgatctttattaatgaatttattatcaggaagaggagtgaattgtgcagctttatttttctttgtctcttgttccttagctaagatcatttgttgaactgaagttaaaggtctttcacttttcttaacattagtagaagatggagagtttagttgtcttgaagtgtcctctgatgcatctatactacttaaaaaggcagcagccttagtcatacgtgatgatgtcattgtatgtatatagtagaaagggtttgtttacttttagatggtagtctacacacacgacacgactaaaatgatataatttatcgattgaatcgaagaagataatttagttaaaattcatgttgtttacaatttgccgaaaagagaaacctctcggaaaattgaggaaaagtagtgaaattaaaaattaaaattgcgagagaagccataggaaatatccttctcataggaaaataagaaaataggaaaataacttcgagaatgttccacatcttgaaataacgagccttcttgaaatttacagtgaacgtccattaatttacggtatcagtggcaatttctatataaagacaccaagtgtccactttttcaaaggatatttatttttcaattacctcctatctctctctcttttttgactttctactttaaacaacaagtaaaatcttataaacacgcattcaaacatgtcaaagactgaatcttatgagttccaagctgaaatttctcagttaatgtcacttttcattaacactgtttattctaataaggaaattttccttagagaattaatctctaatgcttctgattcacttgataaaattagatatcaatctttaagtgatccaaaagttttagaatctgaacctgaattatttattagacttactccaaaacctgaagaaaaaatcttagaaattagagattcaggtattggtatgacaaaggctgaattagttaaaaatttaggtactattgctaaatctggtactaaggcattcatggaagctttaactgcaggtgctgatgtctctatgattggtcaattcggtgttggtttctattctgttttcttagttgctgataaagttcaagttatctcaaaatcaaatgatgatgaacaatatgtttgggaatctaatgctggtggtaaattcactgttactcttgatgaatctaatgaaagaattggtagaggttcaattattagaattttcttaaaggaagatcaattagaatatttagaagaaaagagaattaaagaagttgttaagaaacattctgaattcgttgcttatccaatccaattagttgtcactaaagaagttgaaaagaaagttgaagaagaagaagaaaagaaagatgaagaatctgatgataaagaaccaaaacttgaagaagttaaggatgaagatgaaaagaaagaagaaaaaactattaaagaattagttactgaaactgaagaattaaataaaactaaacctttatggactagaaacccatctgaaatcactcaagatgagtataatgcattctataaatctatttcaaacgattgggaagatccattagctgttaaacatttctctgttgaaggtcaattagaatttaaggctatcttatttgttccaaagagagctccatttgatgtctttgaatcaaagaagaagaagtctaatattaaattatatgttagaagagttttcattactgatgatgctgaagaattaatcccagaatggttatcatttgttaagggtgttgttgattctgaagatttaccattaaacttatcaagagaaatgttacaacaaaacaaaatcttaaaggttattagaaagaatattgtcaagaaatgtattgaaactttcaatgaaattgctgaagataaagaacaatttgataaattctatcaagctttctcaaagaatattaaattaggtattcatgaagatgctcaaaatagatctgctttagcaaaattattaagatataattctactaaatctggtgaagaaatgacttcattagctgattatgttactagaatgccagaagaacaaaagaatatttactttattactggtgaatcattaaaggctgttgaaaaatctccattcttagatgcattaaaggcaaagaattttgaagttttattccttgttgatccaattgatgaatatgctgcaactcaattaaaggaatttgaagataagaaattagttgatattactaaagattttgaattagaagaaactgatgaagaaaaggcaaaacgtgaagaagaaattaaagaatttgaaccattaactaaagcattaaaggatatccttggtgatcaagttgaaaaagttattgtatctcataaattagttgattcaccagctgcaattcgtactgcacaatttggttggtctgcaaatatggaaagaattatgaaagctcaagctttaagagatacttcaatgacttcttatatgtcatcaaagaaaattttcgaaatttctccatcatctccaattattaaagctttaaaaactaaagttgatgaaaatggtccagatgatagagttgttaagaatttaacctactttattatatgatactgcattattaacttcaggtttctcattagaagaaccaactgcattctcaaagagagttaattcattaattgctttaggtttaaatattgatgatgatgaaactgaaactaatgttgaatcaactgaagaaccaaccgctgaagctgaagctgaatctgctatggaagaagttgattaaatgttttcatgaattaattgtatataacttgatttattatttatttatattacccttttcttaattgtttatatagtttaatactttttttttacaaatctaactatacaatcgttcgtaaaataacatgtaaactgccttaccatcattaagaatatagtctgttgaaacttcacttattttagcatcacttattctccaaaatggtttatttaaaacactacctaattttttaccctttgtggtagattttgacttacctatctctggtatatcatttacatattcatcttcgtttatttttaaatactgtggtttacgtcgataacattcataatgacctgatgaatgacttccttgatgtctaataacacttttcaaacgatactttaacatgagatgatgatgatagagttgttgggaactcgagtatttcactaattgatacattacatgcatttttccatgattgagtatctgaatacattgatcttgataaatgaattggaattatttctggagtttcaataaatgtattctttctaacaactgttgatttcttaagttgtcccagtaatgtttcattattgaatagaatggacttataggtatcattttcacgtaaatcatcattaattcgtaattcaccggacattaatgattcttttaaagtttgaatgaattcacgttgttcgtcattaattagtttaagtttatcagtattgaaaacgataaatttagtgatgcaaacaaaacatgaataatcttcaataacttcatttctttccctttcaataatgtccattaaagtagttgatgattgtgattgtggtaccattagttctaacgtcattgtgggtattttaactggttttgatatccctttacatgagaaacattgaagtttagtctccataagctgaactaaatgggaaatgtggaatcttacctaactctttcttttcatcatctgttaatttagacatgaatgagaaaaacctattatattcatcctctaatgtctctaaaataattgcaaataattcatgtgcatcatgttgtgatcttgatattttacctaaatgaatattctctaataaatgtaaaaaatcccaaactgaataaagtttcaggtgaatgaattgttgattgtaatctattaagtaaattcatcattgataaatgtaatggcattggatatttaattgcaatttcaggtattttaaacattaacatttcttcaaaatatttgtttaattcgtataatggaactaatgattgaattgttgaattagcaaaacaatcatttcccgtgttgatgaaaccaggtagtatatttatcaggaacgttttgatctctttatttgtgtgtcggcattcttatttgtaatggttggtattaatacataacttgcaagtattaatgaaaatatacttcctaaaaaccatggatttttcctatttctgtaggaataaattctagcttttcgtataaaccagacgatgttgtacttaatgtaatctatccatgatgattctttaataggttctgttcgtactaaccctataagattatcaagaatccccattgctaaagaaagaatgaaatttcattgacatgaaaaattcgtaaactcggacttattttcaaaataaaacgtaattcattaaaacatttaaaatacaaaatacaaactatataagggaagtaaataatattacttttaaataacacaccaaagctctcacccttcagaatattatcctaaaataatatgaaaactttaatcagatttattgaataacaacaactaaatcacctgaatcaatcatatcaccattggtatgaagaactttcaagactttaccagattttgttgaattaacaaccatttcagttttcattgcttcaataacaactaatccttgaccttccttaacttcatcaccaacattaattaatgatttccagaatctacctgaaaattcagaataaaccatttcagcatcttcaggatattcttcaacattttcttcaattttactaccagattttgataattcttcatttgcaacttgaattaatctcttaaattcatctaatttttcaccatcttgagttttttggaaattttcaatagattcagaatttgcttgaatccatgataaatatttggtatgatcgaaaactgattcaataatgtcaacttcaaatttaccatatttagaatcttcaaccataacttctaattcttcttcactaactggataaaatgaaacttgatcaaatggtgttaataaccatggtttaccattattgaatttctttgtatattcacctaatgataatttatcccaaattggaattgttctaccaactaattgataaccacctggtgattccattgtataaatacacatatacataccaccaataccaactgtgccatttggtgtaaaggttcttgatgggttatatttggaacctaaaaatctatgtcttggatctaatggaactgcacatggagcaccaaggaaaacatcacctaaacctaaaactaaaaatcttgcagaatataacatatctttaacttctgatctttcaataccattaatatttgcaataaaatcaacattatttggtaaccatggagcatcagatctaattgtttcttggtatcttttaactgcatctaatgtttgtttatcttcaaatgccattggtaatttaacaactcttgatggaactgtccatttgtttgtaaatgcaacttctgattcatatgcaattaatgtttcaactaatgttttttgatgaatttcaaatccattatattcaattaaaacagatctaacaccttgtgacatttcaataataccaatagttttatgagtttcaaccatttcaattaatttatgaactctataagaataatttaaatccataatattctcaccatattcaactaaaatatatctatcacctgcttgtctataagtaacaattggtgaatgttcatttgattgataaactgataaaactggattttctggttcaattaaaccttctgttaaattaattggttcacctttgaatgattcaataacatgattttgattttcctttaatgataatgcattatcaaatgtaattggtacaaaggtgattgaatcacctggtttaacttgaccaattttccacatttcagcatctgcaacaactgcttgacaaacaaatccacctaatgaaggaccatcacaagttaaaataactggttcatcacctgtaaaattaattgcacctaatgaataaacataatcatgagcatttgatggatgtaaaccactctcaccaccatcttttctagcccatttaggttttggaccaataagtctaacaccaaatctatttgaattataatgaactttccatggatttgagaagaaatctttaattgattcctcagtgaagaaatcaggtgaaccatgaggaccacatgtaacaccaacagtccattctttattagttgaaatttttggaattaattcctttggtgcagctaatggttcagaaactggacctggtaatgaacttgaagatgattgatttaagaataaaacatcacccatctttaaaactctaccattataaccacctaaattacctaatgcaaaagttgatcttgaacctaaatattcagtaacatcaataccacctctaattgctaaataagatctacaacctgtagttaatttaccaattgctaatttatcacctcttttaatattaattggttcatacatattaactaattcatcatttaatttgattggaacctcaccaccagtaattgcaataacagtttcatgatggaataaaattgatggaccagttaaagtaatctcaattgcaggtgctttataatgattaccaacgattctattagctaatctatgagaataagagtccattggaccagaaggtggaacaccaattctccaatgaccaactctaccaggataatcttgaacagttgtataagcaccaggagctgtaatttcaaaagcatttggtttataatcataagaatctaaaattttagtatgcattttagcattttcaaacatttctgaatttgcaacactctttaaataatcaacatttgtaatacaaccatagacagttgtttcttcaagtgcttttcttaattttgataaagcttcagctctatccttaccatgaacaataatcttagctaaagttggatcatattcagatgaaacaacggaaccagttttaacccaagtatcaattcttgcaaaatcagggaatttaacattaattaattgaccaggagatggctttaaaatctttaacaggattctcagcatataatctagcttccattgaagcacctgtaactttaatttcttgattaaaatctggtgacatatcagcagcaatataaagcatccattcaactaaatctaaacctgtaaccatttcagtaattggatgttcaacttgtaatcttgtattaacttcaaggaaataaaattcatctctttttccatcataaataaattcaactgtacctgcacatttataattcattgaggaagctaattgttctgcagcttttctcattttttgtctagttgattcaggtaaatttggagctggagtttcttcaataattttttgatttcttctttgtaatgaacaatctctttcaccgattgcaattgcattaccgaaaccatcaccaaacatttgaatttcaacatgtcttgaattttgaacaaatctttcaaggaagacacctgaatccccaaaatatgatttaccttgatgttgaacagtttcgaaaactctttcaatatcatcttcactatcaactttttgtaaaccaataccaccaccaccaggcagttgatttaaccataattggatattctaatttagctgcaatttcctttgcctccttagcagtagaaactaaacctgaacctgggactaatggaacacctgccttttctgcaatttctctagctgaatgttttaaacctaattttctaattgcatcaccagttggaccaacccaaacaataccattttcaattaatttatcagcaaaatcggcattttcagaaaggaaaccataacctggaataacagcttcagcacctgaatcaagaacagcttttaacattttatcaatattaatataagtttcagcagctgatgtaccattaagatgaattttttcatcagcaataagtacatgttcagcatatttatcaacatcagaataaactgcaactgatttaatattcaatttttttaaagttttcataattctaacagcaatttcacctctatttgcgaactaaaactttattaaaaggttttgattttgaagattttttagattcttcatccttaagataatttctccaaccaccaaatttagtaatatcagttgtaccattttgtaaataaccaaattcttcacaaataaaagatttaacccatttaccatcaattgtttcaactgatccaatacctaaaggttcaggaaccattgcgatgaaagtaccaaaattttcaattggaacatgcataaatttcaatttcaattgaatcaccaccttcttcaactcttctgagacctggttttgcaattggaccagtttttggtaatgcatataatttataatttttgttagttttagtagttgataaataagttgcttgaactttctctaattgccaatgtaatggtaaacctttcaaatgagcaccaacaactgctaattgaatagaatttgataaatttggtgatggaattgatgagattaaatcatctttaataccagcagatttagttgggatattaccaattgatctatcattagatggatatttttgtttgaaaaatctatttgctaaatctaataatgcataatcttcaaaagctttaccaataattgtaacaccattaggtaaaccatcagattttctgaaatcaacaggaattgctaatgctgaaaaatcctgctaaattacagaaattagtccaagtaccttgaattgaattaactttaattggatcattttgaacttgttcaatagttggattaagtggacaagttggaaccaataaaacatcaatatcattaaatgctaatttaactttatttaaaattgattttcttttatattcaaattcataagcagttgcagcatcataatttgcaccacctttaataattttagtaactgttggatctaaatctttttcaggtggtgaagttttataaaaatctttaacagcagaatatctttcggcaacccaagtaccttcatataaacatttagctaaatctaataaaggagtaaaatcagctggaacaatttctgcaccaatttttttaaaattttcaattgcagtattataaatttctttattatcattatcaccataccaaagaccattcatatcaattggaattgcaatttttaaatttttattataagatttaactaaattatttggtaaaattcttgaatattcacaattaattaaatcatcctttgcagttaaattgaaaattaattgagcatcagataaatttaatgcaaaaatagaaggacaatctaatgatttacaagcaggaacaataccataagttgaaatagcaccaacagttggttttaaaccaattaaattatttaaagcagcaggaacacgacctgaaccagctgtatcagtaccaattgcaattggacataaacctctaccaactacagatgcggaacctgcagaagaaccaccagaaacatgtttatcactgaaaacacaaggggttataccataaggagatcttgtaccaactaaacctgttgcaaattgatctaaattagttttaccaataataattgcaccattatctcttaaaagagaaacaatagttgaatcattttcaggattataagagaaagaaggacaagcagcagttgttgggaatcctaaagcatcaatattatccttaattgcaattggaacaccatataattttaaatttgatttatttgattttgattgtaaaattttccattgatgatttaaattttcaatggatgaaattgaaatccaagcaggatcatttggattaagtgattcaattaatgatgtaagagttttaagtgattcatttggagttgtttgttgatggaatgaagtccaatctgaaattgaccaaccaattgtattcattctatatataaaggatgttagtattgtgatatatgatgggtggaaattagaataaaaatacttacgttttatagttgattaaattaaaaaaaagtaagactaaaaagtgtgagagaatagggggggttaaagccttaagatttttcctttgattaatgaaaagatgtaaaggatagtaactacgggggaatacgattagtttttatataatatagatcaaatgaaatgacggaataaagatacacggtgcatcatcacaattagataaaagataagaaaagaaataaaaacgccgttattgtttcaaaagaaagaatttaaaatttagaaaaaattttgacgggccgaaatgacagcttaattaatggcccttatttttctcggtattgacttccattgagtgtagtattatgtaagtataatagccttatgaatgtacggtgtaccggatgattaagggtttattataagggttgtattaatattaatattagtattaatatgtggtatatttagtatgtggtatatttagtatgtatcgtataaaataggcgataaccgaagtggtaattatttgattattcggtggcgcatgtgttgtattggtatattagtggcgcatgcatgtataccattagtataatgtaaggtaatgtagataagagataaggaactgttaatgtagtgttgggaaagtattgttgttagtataaattgatatgattattattattactactaccatgtaaaatattagagatggctttgtcatattggtaaatggtcaatttactctttttaggtggctcagttctattactatttgttctcttttctgtatctttcctttaatttattaaatattttacagtagtagacactgtggatactattctataagacattatactcatatcaccataggaagtatacaattagttacgagtattactgatttatcagagtgttaatcatatcacacacaacaaaccatatgtcatagaatagaataaaataaagcaccgacgcaccgacgcgaaggctcttcaagaaaataaatgaaaatttaattactcaaaagaaaacaaaatttcaaattttaaaatcgcataatactaattttgccctttttcgcccttgaatctattacataacactaactttctcttcttttagaaacaatcaaagattcattcaataatagtatctacataatatcaatacttaaatagatcaactacatcttcttttctatttctaagtttctaattttcaaaaagtctttactaaataaaaataccccaaccccttgtttaataataatttctcaattaataaaatcttcttttattttaatactatattcaaattatgattaaaagaagttttattaattcactaccaattcaattgaaatcaattattttagatagtgatagtaatattgataataatattgataatattgataataataataataataataatagtccaagttctactcctagtccttagtcttagtcctaatttagattctattccaaatgatcaattagagtttgataataataataataataataataataataatggacgataataataataatttacatccttttgatgaatcaattttagaaaaaaattctcaactcgatatttcaactcaaaatttcttaattgataaattaattaatcaaaaaggtattattttcactgaatttaatgatattcaattgaaattatttgatgttgattcaactttatcatcattagaatttgataaattattatcaagtttaaataatcaatcaagaattttattatgtgaaaaaattaaattaatttatggttttgatagtttaacttctttcattattagattaattaatatcttaaattttaatactttcttctcaatctttgatattacttcaaatataaaattatatggcttttattcattaaattatatgaatccagttgaaattttagttaaacaaattagaaatgatttatttattgttaaatcttttaaagaatttacaattcaagaaatgaagaaagaacatgatttccatttaccttataaagaatttaaaagattaaatttaaatgatggtaatttagttgttgttaaaatcttatttaaaaatgaacaaaaaccaatcgatttatcattaattaaacctttattacctaaaattaaaatgttacatttaagtttagaaaatgaatcaaaattaaaaccttttaatgatttaattgataattatggtatttcattaaattatttaaaatttggtgttaatagaggtacttttaaaaaaattccaattaaaaataatattaaaactttaaaattagttaatattgataatttaaattttattaatgatttaaaagattgtaattcacttgatgttttctttgataattgggaattaaggaaaaattgtgatatcaaatttaataataattttattattgatttccaaattaaatcaagcattcaaaatttaaaaattttaaatatttttcatacttatattgattcaaaagatttaaataaattaaaattatttccaaatttaactcattcaaaaataagttatgtcattttagataataaaggttttaatatgactgattgtattaatttacaagaattaaaaattcattttacttatcaaaaatcttttgatgatttagctgatattagtgataatgaaattgaaatgaataattctcttacaaatatcttttggccaaaaaatttgaaaaaattatcaattacaattcataatattaaaaatttaattcaaaattttagtattagattgaatatattgaaaaaaattgcaaaacctttaccaagttcaattgttgatttatgtattgatattagttacgatactggtggttcaggtcctgaattatattcaatttcaagagatgatattttgaaaatttcaaatttaattaataaaattttaacaaataatttagaaaatttaaaattaaaaggtatttcaagatataattataaaattggtaaaccattaatttttagtgcaattaatttcccttcatcattaaaattattatcattaaatgattttattttagattataattttattaatttaccaaatttgaaaaaattatattttgaacattcattatttgattcagattttaaattaccggattctgatgaaattttaattgaaaaatgtacttttaaagatttatcatatattccatcaaactcaaataaaattgaatttaaaatgtgtacatttagaaatattccaacttataatggtgatatatcaaatatcattattaataattgtagagttatggaacaacctgcaaatgatattttccaatttcaacaacaattacaaagaaatggtaataataataataataacaataataacaataataataacagtaataacaacaataataattctaataccaataacaaacagagaagaaacaataataaccaacctaaaaataaattaaatcaacaaaattctcaacaacaacataataaaaaacttaatgaccaaattaatgaccctaacttatatatgaattataatactcaatcgcaatcacaatcacaaactcatcattcaaattctctgccatttaatacattatcacattcaaattcaatcaatgaaattaattctaattctaattataacaataataataaatctcaatcatttgactataatacattaccacattcaaattcacttgatagatcagcaagtgatttagtcaattttctaaatattaataaagatttagagtatcaactgaataatttatcaattaataattcatcacaatacttaaaacatttgaattcatcaggtcaacatactccaaatattgttggtatttcaagtccttcattaaatttatcaatttcatcacctccaatttcagttcactgataatcatacaaataataataataataatccattatttaatcaattaaataatttatatgattccaaatctccaccattattacaacaatcattatcatcaccaaataatcaacatttttttaacaatatcaatggaaccgatcatcatcatcatcatcatcatcaacaacaacaacaacaaccattaagttctgatatcacaggtatttcaatttcagatcatgataatttgaaaaagactaatactaataatagtaatatcaattcacttaatgaagattcatttatcaatcatatgttattatcacataataatccaaatatttcacaatcaattccaccatcatcatcacaatcagctacatcaactagaccatcatcacaatatttagttaatccaattttaggtgcaatgaatagtggaggtaataatagttcaattagtatgaataattataatgatttaaatatgaattgaataatatgaataatatgaataatatgaataatatgaataatatgaataatatgaataatttgaatatatgaatattaaataacttaaatatgaataatatgaataatatcaatcatatgaatgcatttaataattttaataattcattcaatagtttcaataattttaataataccaatatgaatacaagtattaatatgatgaatatgaatatgaatttaaataatagtatgaataccagtatgaacaatagtatgaatacaacaatgactaatccaatgatgttcccaactaatacatcaacaccaacatctgctaataatattcaagatggatcagtttcatcatcaagaaattcatttattgatgttgaaaataatttccacaattaaaattaaacacttttcttaataatttatttacttacaaaccaatcaactaaaagactctttcttattttcttgttacttattttaatttcaattttattacaatttcaactactacattctatataaaacttctaactttttttctatataacataacataacataacatataatatacaattaatcaataactgaatttttcacagctaataaacttaactgaatacaaccttccttagttattgcacctgcaatgaaaccttgagaatgaacaaattcagcatcttcaataccacaagtttccctcaaaacattcttctccaatcctctccaactattagggaatttctttcttgattcatatgatgatggtttaataggaactgcactaactctccaatcatttgatgaatccggataaacaacatataatattttcctataccctttcctctctaaattaaataaatgttccttccaaggaacaaatttatctaaaactaaaatttgattataattatcattaattaatgcttccttaacaacttcctctccttgaaagaaactgaaaacaaaataattaatataattaacaacagctaattttaataattctacaactttctcaaattgttcaacgactatcaccattatcaccatacctttccactacattaattaatccaataccaattggattaaattttaaagttgatttattagaaacaccacatgaatcaacaattccaaaagtatatgcatcaattatttcaatccaatcaaaatacattctctcataaacaaccccaattcgtttatcattaatatctaaacctgtaatacattgtatcacacttttaccaaaagttttaaaaattttaccacataatgataatggtatcctacattttttattatcattaaaataatcaccatttcgttgacgttttattggatatttaacggtataattgggtatcataaatgatttacctttttgaaatggatgtataccaataatataatcgggaagtttagtagtgtaaagtggtacttgtttaatttcactatttgggtgaattattcgtaataatgtaacacttagtgcaatatgtagttgaaattgatcttcattagggatatgtattattggtggtgttgatttaactttctttacttttttcatgtatatgtggctgtacaagtgatattaattataagttatacaaaagtttgggaaatatacaaaagaaaaggtttattgtacatgataaaaaaaatattttttttaaatttaaatttcaaagatgaatgtttaaaatgtcatatcttgaaaactgtgagttacatattggacatttacgcatacgtgaattaagtctatcatcaacacattctttacagaaacaatgtccacatgtctttaatgatacattcttaaaatttttacgacataatgaacatttagtcatacttaataatgcttcttgaatatcatcagatgaatcattattattgctatttataccttgatttttcaatttattctttaaatgttcaacttgtttcttctctgatgaatattgttgatgaattgttgaatattttttctctaattgttgaatttgaaatttcatttgagaaattgtggaatttaaatctttttcaatattaatcttttcattaattaatttatcttgtttatcaattttacttgttaatgaattaaatttggtaatataagttttctcaattctttctaaaatttcatttatttcattacttacctttaattttttctctaattcaatttcattagatttcatcatttcaattaattcattttgtttagctaaatttaatgacaatattttattttgtgatgataatgaatcctttaatctcattgcttgaaaatatttttcatctgccttagttttttcaactgataatttattaatcataatttcatattctgaattttttttaattttattatttaaattttctcttgttaatttaaatgcattttcaatttcctttaattctttaactaaaacttcattttgttcattaattgaaattttttctaattctaaacttaaatttttctctaattcatttattctatttgttaaagtttcattattatttaagagtaaatttataaattcatttttacccttttctaatttataaacattaattttagttaaaagtgaatctctatcagatctaattctatttaaatcattttcaattttcgttatataattattattatttgaaatttcagatttataattatcctttgttttattttcatttaatgataattttgattcaatttcaaataattgattttgaactttttccttatttaaattattaatttcaatttcttcatttaattttttattttcttcaattaatgatttaaatttacttgaaattttaattaattcatcatcatcattaaaatttttaagtttaaattttaattcattaattttattctctaaatttgatataaaattaattttttcatcaagttgtaatttaagtgattcattaataccttcaattgaagaaatttttaattgagtatcaatatcatttattgatgactcattttgttgttcttgttgttgttgttgatcgttttttacttcagttggtaatgcatctacactattttcttttttaatttctgtgttattagtgttactgtctttattttcaactttttcatcatcattatcatcatcagatgcaacttcaccctttttaattaatttaagagatttagaattaattctatcatatttttgaacaatatcttcaattttttcttttaaagattgattatcattagttaataaagtaattttattatttaaatttgaaatttcaatatcttttgaaattatattactattattattattagttaataaatcatctaatttaacatttttatcatttaatactgaatttagtaaattagataatttatcatataatgtagataattgattatttagagatttatcatctacattaacagagactaatatgttattattattattggtagtattagtattactttcatcaatatttttttcgaaaacatttataaattgattccaccaatgaaataaagttgaattagccaatataagattattaagagaatgataagcattttgtaaagaatcatttaaaattgaatttttaacatattgtaaatgtaataatctataaattgcttgcttttggaaatatacgacatcatcttgagataaaggtatttcacctggaggtattgaaggattagaagatttagtatctaatatagtacataaccttttctgtaatacatgaggagatggatgtttcctcttagtcattgttagtatagtatagtatagtatgattatatgaataaactacaaagtatggtatcgatgttgatatattaactctttcaacaaagtcaaattaaatttctcgaccataataaacaacaatcgttacgtaatcacagtaaaatgttccagtattaataaagtggcaaataggagcggggaattgagagagaaatttgaaagttaagaaattgggttttgagaaggagagggaaaaggcactctttttatacttgcaatttttaaattgtaatttaatagctaataagctaatagttgccctgttttgccacccaatgtttgccaatatcgtcagagcctccttaagatcatctttatctgcttctttaagatcaactactttaaacactggtgctttcagatttgtatcaaatgtttcaagggatgatgtatttgcaagatcaattgctgtattgaaaacttttgaattaaagaatattaatgatgaaattacttcatcaactcaatttacaaaagatttaggtatggattctcttgattataatgatgcattagttgcattagaggaagaatttgatgtcgttttcgatgatgctgtagcaaatgaaattacaactgttggtgaagctgttgattatatctctaaaaatattatgcctgaagaagatatccttgataaagaaattcgttaagttatttcatatatattatatcttatttattatcttgtatatcgtccatatattatttatttatttatataatatcttaactctatattattattattattaatgagaaaaaaattgtaatacttattttctgtcataaacttctttctttaacggaatatacacaaagacactatgcaaaacttaaatgataaagtagaggaattgatcatatctgatggtaaatctgctgataattcagatatggaaagtattcataatgaaacaattgatgaattaactgaacgtgataatgaagatcaattaagagaaaatgaatcaaaggcaagagctgatgctttacaaaatattaaagatacttatggattaactgaaataccagattctacaattgaacaattacctgcagatgatgaattaacttcagatataccattagatacaacttatattgaattaattcatatgaaaattaaatctcttgaaagtttacatttagaaaatttcactcaattagaattaattaatttacgttgtaatcttattgattcattaaattctctcaaatatattgaaaataaagaaaaaatggaagaattagacttctatgataatagaattaatcatatctcaaaacatattaattcttttaaaaatttagaaaatttagatttaagttttaataatattaaacatattaaacatattgaaaatttaactaatttgaaaaatttatattttgttcaaaataaaatatcagttattgaaaatttagatacattggttaatttaattaatcttgaacttggtggtaatagaatattggaaatttctaacttggataaattaacttcattacaacaattatggttaggacaaaataaaataacaacattaaaaggattggataaattaactaatttacgtatattatcaattcaatcaaataaaataacaaaaatagagggattatctaatttaaaatcattggaggaactttaccttgcagataataaaattgaacaattagaaggattagagaatttaactaatcttacagtattagatattacaggtaataagataagtaaattagcttgtttggatacattaactaatttaactgatttatggtgtagtcgaaatttaattgatgattggaataatataagtaaatcagttaaaaatttaattaatttagagacagtttattttgaaaataatccaattcaaagaaatgaacctacaatgtatagacataagttgagattgtgttttggtaagtctttacaaaagattgatgctctctatcttgccaattaaattgtataaacctcttattaataattctttaataaccaacttaccccggagaaagaaaaagaaaatcactgaattttcaaaaatttttttttttcgatttgatggaatgatggcggcggggatccttatttgacgttgccttaatgctcagctgattaagtttgatctttgtttgatctttgtttgatctttctcttctttctaaggtaacaatgtctgtaattacagtcaatactacaccttatgatgatcaaaaacctggtacttcaggtttacgtaaaaaaactacacgtttccaattaaaaaattatacagaaaattttattcaatcagttttaaatgcaatacctgaaggtgccgaaaatgctcaattagtcgttggtggtgatggtcgttattataataaagaatttattaatataattgctcaaatatctgccgctaatggtgttaaaaaattagttattggacaacatggtatcttatcaactcctgcagcttctcatattattcgtaaatataaattaactggtggtataattttaactgcttctcataatcctggtggaccagaaaatgattgtggtattaaatataatttatcaaatggtggtccagctccggaatcagttactaataaaatgtatgaatattcaaaatcaattacttcatataaattaattaaattagatgaaattgatataaattcaattggattgaaaaattatggtcctctggaaatcgaaattattgattcaactaaagattatgttgaaatggttaaatctatctttgattttgaattaattaaatcttttattaataataccccaactttttcatttttattcgattcacttaatggtgttacaggtccttatggtaaggcaattttcattgatgaattaaatttaccattaaattgtattcaaaattataaaccattagaagattttggtggattacatccagatccaaatttaacttatgctaaaacattagttgaaaaagttgatgaaaataaaatagctttcggtgcagcttctgatggtgatggtgatagaaatatgatttatggttataattcatttgtttcacctggtgattcagttgcaattattgcagaatatgctaattgtataccatattttgcacaaaatggtgtctatggtttagctagatcaatgccaacttcaaatgcaattgatttagttgcaaaggataagaatttaaatgtttatgaagttccaactggatggaaatttttttgtgcattatttgattcaaaaaaattatcaatttgtggtgaagaatcttttggtacaggttcaaatcatattagagaaaaggatggtttatgggcaattttagcttggttaaatataattgcatattttgcaaaatcaaatccaaatgttgaaccaacaattggtaatattcaacaaaaattttgggaaaaatatggtagaacatattttactagatatgattatgaaaatattgattcatctaaggctgcattagttattgataatttaaagaaatatattaatgattcaagttttattaattctaaattaggttcatcaattgttactgaggcagatgatttctcatatactgatttagatggttcaatttctaaaaatcaaggtttatatgttaaaagatctgatggtagtagatttgttgttagattatcaggtactggatcatcaggtgcaacaattagactttatgttgaaaaacatagtaatgaatcatcattagaaactcaaatttatttaaaggatataattagtgaaattgttgaatttttaaaattaaaggaatttattggtacttcagaacctgatgttaagacttgaatttttttctttgagtttatttttacttctttattatattatatatattatataaaacaaatttttatctaagttgtccataatcttgcattaccatcagcaccagcggagaataaccaagcttctcttggatgccaaataatatccaacacacctaatgaattaattactttatgaccttgtaatttctttaatggaactaataaaggatttgtaattaaatcatcataaacagttgcatggaaaacatgtatactaccatcatctgaagctgatgcaaataatggtaatgaacctttatgaaatgaaactgatctaactgccttttcatgatatcttaaagttttataaggagttgaagataattctaaatcatgccataaaactcttttatcatatgaacctgcaattaaatgttcaccaccctttggatgaatatctaaacatgataaccatcttgcacctggtaataattttttaactaattgttgtaattgtaaattatagatacgtatataacgttgtgacataacaattaaaattggctttgttggatgaaattttgcatccattaaaatacctctacttttcctaaatggtgattgtgatgcatgttttgataattgatgaattaaaacacttgctttattaccaccatccggtgaaactgataataaataatcaccacgacgatgccagtttaattttttaattgttgatgatgatgttgattgtcccttacctcttgatgttgtaataattaatgaaattccattaatttgttgatctttagttggttttaaccaagttgcagaattagtatttgtagattcagattcttcttcattttcttcattttcttcaccatcaatattatttatattagttttatcattttgagttttaacaaatccaaaaccattttcaattcttttatgaccttcattttcaatttcataaccgaaaattggtggtatacaaagataaatattttcaccgactgaaattgctaaaataccacaagttgaatctggattccattcaactgattcaatatgatcttcattatcttcaatatcttcaattaaagtaattttgaaaacttctctacctgttaaaacttcccaaattctaacagtaccatcatcagaacctgttgctaaccaattaccagttggatcaattgaaattgaacgaattttacctgtatgaccttcataaattgttgaagttttaattggaaatggtcttaaatcttttggtgatggtaattcaggaattaaactttcaggatcaatatttaatttatttttacgtactcttggtgcaagataaagatctaaacatctttcaaatctttcacgtaaattattttcataacctggaactttacgtaaagaattaaacttttgtggaataaaatttgtttcacgttcactttcatctttattcttccaatcatttaattcttcctctgtgaaaacatattcccctggtggattataagattcttcattagttggaggtggtaattttggtgctcttaaagtcattatatgatcttttgaaatttcatcatttataccttcccataaatcataatttaattcattttgattttcatcatcaatttttttacgatcatttggtgataaaattttaccttccctaattgctttaactaatttcataattcttctagcttcatgtttagatggtgtaaatctactctttggttcaggagctgcagataatggcataatttcagttttacttgtaaaccattgaattgttggttcataaggatttgtgaattcatcagtattttcatttctttcaattttattaattaattctaattcttcttcacttatattaagtgaattacctgaatttttatctaataaacctgtccatccttctggtaaatcaatactttctaaaagttgatctaatgcactacctttagcaggacgcataattcttttaccattaagatcataaccaatatgaggatattcatcataagctgaaattggaatattaccaatagtattaacttcttcatgatcagaatcatcagaatcatatacaggttcaatttcaggtttaataattctttcacgtccatctgaaaattttgtttgaatttcatttaatttattaattgaattatctgataatgtacgtaatttaacttttgaaagtctttcattaagtgaagttgtatcattttcatcatcatcttcctctgcagaagaagagatttcaccttcactatcttcctcacctaataattcattgaattcatcatcagaatcttcattatcatcgttattatcactatcatcatcatcatcaccatcctctgtattaatcaatccatttaattcgaattcttcttcctcactctcatcatgttcatcataacttcttttccctgtcttttcaacagccttagaacccatattcttatcgttattccagtaaattaaggcaaagaatacagacaaacttcttttacagttacaaaaatttttcaacattaataaaaattaacatgaaaaataaaatttttttaatcttcccaaaatacacagccttataaaaaataaaatactaacctctattattattattattattataccccccagatgataactttaccatcatctgaaccacttgcccagtgaatacccctagattcatcgaaataatcatcacctctccaatcaacacaattaactaatccatcatgtgcctttaaacaatgtaatacattaccttcattaccccataaccaaatttcaccattttgtccaccaccactaattacaatacttgaatgataattataattattcatttgaggattataatcaccacctgcacaaccacgtaatacataattatttgaagatgaatttggtaaataataaaaagtttcaatatatggtaaattatcattagttgaatccatcatacttgaagtattaatcattattaattgatttggttttaaattaattaaaatatatgaattatttgaattaatacctgaaaatgattttgaaactgatgaaattgatattggttgttgattaaatggtaatttataaattaattttaaattatctaatgtgaaaacaattaattcatttgttaaagtaattgcataaataaaattattttgaattgtaaaatcttgaatttgaggtgaaataattgatttatttgaattaaattgtaaaattatatttggtttaattgatttatcttcaaataattgaattttaaataatttaccatcatttgatgcaattataatttcattattaatttcataatttgaatgaaattttgcacatgataatcttgaatcaatcattattgatctataatctaattctttaatacatttattactattaattgaccaaattcttaaaatttgatcaaatgataatgataaaagttcagttgatgatgaattccatgaaagataagtaattgcctctgaatgtaatttgaaaacattaattaatttatattcatttaatgtatcgaaaatcattatctttttatcccttgaacctgttgctaaataattaccatttggtgaatatttaataaaccaaacttcatcattatgataattaattttaaaatattcattaattggtaatgaatttggtttaaattttggtaatagtaaattttcataatttttagctttattaagtttatcttgtaattcatttggattaagataaatattatttggtaataataatttaaataaattttcaactaataataatcttgattgtgttaaattattaatatttttccaattaattgatgataaataagtatttggagtattatttgaagaagatagcagtaatgaagataaattttgtctaattgataaatcagtatcaagtggcaaagaatttaatatttgtaaagcatttgttgaatttttagcaataattaattcctctaagaatttgaatgttatgattgatatccttacatttgaagataattcctgagatgatgatgatgatgatgatgatagtgatgatagctttgatagctttgatactataagttggaaagtctcctctgatattaataaatcatttattaataaatagtaatttcatattttacctttagataatgtttatcagctttatcaaagtccggtaagttgactatttgattagctatatctgaatgattattctgatagagatactgtgcaattagagtaagtgtattcattattttaagaagaaatgatagtgttaataattacaattacagtctatataatgagatgaaaccacaaagcgaaatgtcaatgcagtgagttaaagcaaaggacatattataaagcggttaagttgatctcctgccagccatttttatagtcactcgatagagacagtacaaggaccactggtattccggcagtgtgtaatatgtatgttaaaagagagatattgattaagattcttcataataagagcagtgtctctttcttttatagtgcaatttttttcattgagggttcttcctatattaagggttttatatataaggtatattagctgtcgtctttcttttggtaaggatgtctacacttacgtttgttacaggtaatgccaataagttgagagaggtagtacagatcttatgtgatggtcaaatagagggtgcaactattggtaaatacaccattaccaatgcaaaaattgacttggatgaaattcaaggtagtatagaggaagttactaaacataaaactgaacaagcagctgcaattgttaatggacctgtacttgttgaggatacttgtcttggatttaacgcttataataatttacctggcccatatattaaatggtttgttaatagtattggtttagatggattagttaaaatgcttaatggatttgacgataaatccgctaatgccgttacaacatttggattctgtgaaggtccaggttgtgaagttgtattatttcaaggtgtcacggagggtgttattgtaggaatcatgtggcccaactgattttggttgggattctatttttaaacctaatggatttgaaacaacttatgctcaaatgaagggtgatgcaaagaataaaattagtcaaagatctaaagctttaattaaagttaaagagtattttaataaataaatagttgagtagatgtaaataagtaaataagtaaataaggtataaaaattgtgttagaaaaaagaactttatggtataatattatatgtttagtaaattagtaaaaaaatcttgaaataactacttttaatatgaaacaaataagtagtgttaataaagctaataaaatataataacctttagtaattaaatgataagtgaaagtaccattaatagtttctaaattatgattttcaatttctttaataccatcagtaactttttggaaaatgtattttgattcattaataatttcaattttttcctcttctgaaaggaaatttctagtttgtaattcataatctctcttgtaaataatacgtaaagtttccatatcttcaacatcaaatttatagaaattagtaccttgattaataaattcttcataagaattattttcaattttcggatataaacttaaagattttgcaacttgtgaactcataattctaccacctgcaaataatgcaagatataagacatgcatataagctaataaaaggtaaggatgatcagaagttgattttttaatataatcagtaaattctatttgaccttttaaaattggattttcaaaatgttcactcttatcatgataataatacattaaatcagtaaataatttttcagttcttaacatttcaggtttataaatattttgaaacatttcagtatatttattattactctttaattctctatctaaggcaatttcaactgctttgaaaatatgataaaacatttgaataccttgtctataaattttataatttttaattgcaatggcaaattttagtgtaactaatttatctacattattatgtagacttctagtttccatattgattctattagccaaagcgccaatatcgtttttggcagggatgatttcttgttggttgatttgtgtattagcgtacatgtcttgtagaaagaagtaaataaacatcacgtaaagaccaaagccttcacttgtatttatttacccgctttttctctcagcgctttcagctttttcaattttttcagcttttcttccattttccactgcttggaaggtcttgttatataggacattagacattagacaatgaccacaccggtaattagatcatccctcgtcttgtcgagaatacccatcgtcactcccgatgtgcctgtctttgagaaagctttctatccagtatcaggaacaactggagagaagacttatgtggacattcccaaaatggtattatttcaagaaaggtactgttgcggagagagaattctctaaagcacaaaaatatccaattccaaatcacagaaatgtttggtttcctaaaggtgtccctgatttaaaacatggtagagatagaagatttaaacaagatattatccttccaaagaaaaataatgatatcgaagttagtaacaatgatggtgaatctgctgcaagtgaattacaaaatttagatgatattggtagaccaattaaggctaattctagaatcaccattttcgatgaaaaaaatgatcaaacttcacttgaaaggaaattaccaagaactcttatacttattaataaaaataataataatgaatggactttcccatcatttgaagtttcaaatgatcaaattaataaaggtttacataatattgcagaggaaggattgagaaatattggtggtgataaaattaatacttggactgtatcaaatactcctgctgcattaattaaacataataatggtattaatgaatttttaattaaatctcatataattgcaggtaaattcaatccaactaataaaaatgaatacaaatggcttacaaaggaagaaatccaagacatagtaagtgatgaatactactctaagatcaaccatttactctcccaatagataacctatcgtatataattcttactctctgtaaatactgaataaaatgaaaatttaaaaatttataaaatttccctctcctcgcaggctcagtcaatttaatgttatctatcagctgagcatttccttctttctttcttttatgcttccttttcttcctttatcaaccttcaatgagctctgttgtagagtcagagaagtcctctagtgactatgttgctgagagattggttagattggtttctgttggtttaaaagaagctacaatggattctccaagttttagagcttcaattaatttcactcatatctcaattttacaatgtaatcatcatttagaacaatcattaataattttaagaaattatatgattaatttaaataatttcataaattcaaataatgatataactaatttatttaaaccttatattaatgatttacaatttattaataatgatgtatcaaaaccttgtattaataaatttttaaatggtcaagatttaatttttaaacatattttaacaattttatcaattaatgaaaattcaattaatttaattaatcaattattagatattgaattaacaaattattttattttacgtaaaaattttgaaaatattcaaaataaatatgatattgtgttagctaaatttatgcaattaccaaaaggttatgattcaaataaatcaagagaggatgctttacaattatttgaaattaggaaacaatatattaatatttcaatgacattatggataattattaaacaattagaaaataaaataagtaaagtagtaactgaaatttcaaattctttttggaataatgataatactactagccctatagataatacagaattatatgatgcaattggattaagtgatattatatattcaatcaaacaattaaatttatatgctgatttacaatcaaattcaaataatttacttataaatgatttaaatcgtgcaagacaaaattcagaagaaggtgcaattaaaatgtatacaccaagttcagatttaaaagattttgattcttcaactttatatgatgataatattttacttaataataataattcattattagagaaacatggttgggttttcattaaatcacaaaaattaaattcaaagggtgaagtttggattaaacgttggatgtttattaaaaatggagttttcggtttcctgtcaatttctcaagatggtcaatatgttcaagaaagtgataaaattggtgttttattaattaatattaaatatttagcaagtgaagatagaaaattttgttttaaaattcaaagtaatttaacaaatttaaatattcaagttgaaacaattaatgatttaaaatcttggttaacagttttcaataataatcaaattttggcaaaggatgaaaataatttattagcatctaaaagatatccacctcttctaaatttacttaaattacaaccagttgttgcaaaagatttagaattaattagtgttttaccaatggattcaactattgaaaaaactcaaaaattaattgaaatacaattatcaaattctaaatttaatttatcaattaatccacctctgaaaacaagtatgactgaaaaattatcaatgtctcatctgtatttatcttcaactataataccttcagcaacaactgctaatttttgggggtacgttaattgggggttatattttgtaattgatgatgaacataaagaaaaaattttatcatcaaataaaaatattgaaccaaaaatattaattaatttaagatatccaaaattttatccagaaaatttaagagttgcagatgctgaattaagatcaatttttgaagttttcgttaatgataataatgaatatactttattaagatttaatgcttcttggtcaccaaattcagatcaaacattattttgtacaatttatttaacaaatcatgcatattatgtttatagtcatacatgtggattaatctctatgttaccaattcctttatcaagtgttttagatgttgaaattttgaaaaaaggtgaaaaaaatatattgaaaattttttcgttaatggattatcattgaaaatgcaattatttgctgataatatggaaattgttaaaaataaaattaattatattttagataataataaatctaataatcccgatagtttcaatttagttattaataaattagcaaaaattgaagaaaatgaactaaaatttaaattaaattcaaattccaaattcatatctaaatttaaatcaattgataatgaattaattaatgaaaatattgatgaaattaaaggtattaattcaactattcaattatcaaataatactaatgaaaccagaattttgagtgatatggatattgaaaggaaaattaattatacacctgaaatgcatttattattaattaaaaaaattaaattaccttccaaagcattatttcatatgttatttggtgatgaatcaattttattacaaggtactctgccacttagcttcaagtatttttaaagatgatcatctgaaacatagtttatggagatgtaattctaaacaaaaattatcaagagttgtttggaattcaatatttcaaagtaccatgtgcattacaaacaattgaaagaattgataataataaatattataatattgttcaagaaactccatatttaagatttgttttcggtattaatagaaaaattataatgagattcataatttataatgttgattctaaaacaagtaaattaatgatttattataatttaggtgatgagaattcaaatgtacttaattggtttacaaggaaagttactcatcaaattatgttatttagaattgaagcattagagaaaaaattagatgaatcaattaaacaaataattaatagtaataaaaaaatatcaatggcaattcaattatttggaccaattaccaaatatgatagtgatgaaatgactaaagaggaaggattatttgaaaaatctgtttattttgttccattacaattattttcaacattttattgtgaaaagttgaattttgaatttgaaaggtttatagttcattcaattacgactattaagagaagtattaaattgtttttcaaatttattaatgcaaatttaatactattctctgttttcttcttttcaataatattaaattttattttaattggtaaatcaagtacttcatattggagagagaaaaatattaataatcatcttagacaaataacaggagataattatttaatggaaagatcaattggaataagagaaattgatgaaatgatttatccaaatagtattgatttatcattttcaaatgaaggtagtgaagtttattggaaatttttaaaacaggaaaatttactttatattaatgaattttctaaaattgatggaagtaaatataatgataaatatgatattttaagaggtgaaagggaaattttattatcacaaaaattaacaggtttaagaatggaaaggaatgaaattttatcaaaattaaatttacttaattatttagagagagaatttattattaaagaatggactaattgggttagttcagaaatttccaattgtgaaagagttaaagaattttatcctgaatcatttgaaagtattaaagattattgtaatgaaactgagacggaaatgaaacacttataccaaacattattatgaatataatatatagaaataatataaaattttctatttgtaaacttatatatattatttattataatataatatttatgattaaaatccattagatgctaaattatccattacactaagataaaaatattttggattaaaattaggtactcccatagctaatttaaccattttcattggccccatccaattaattaaatctgcatgatccacatcatccaaataaccaataaatttcccccatttacatgaagataaactaactaaaccatcattatcaccttcattatcataaactattttccaagttataagaaacattgaagcaggatttggtgtaaatgttgcaccataactaaaatatcgtacatttggatcatctttaactaaattattaaaatttttcatataacttgtagttaattggaaaactgatggaaaataattagttattattgaagttggagtataattcattgcaaaatctgcagctgatgtacctctatgaggtgttgaaatagttgttaatgaaacaatttgatatggtaatgttgtagttttcaatataatatttgaatcattatttaaatcgttatttgaatttggttttggttttatattatgtataattttcctattatttaataaatgaattaaatatcgacaatctaatccacccattgaatgtgcaactaaattaattttaacgggttgatcattaggtacattatttgatttccttaatttaggtacagattttaaaataaaattatgtaatgctaaagctcttgtttcaatacctgcaaatggtggtactttagcaaccagtattgtacaaccttttgatttaagatgttcacgtacaccattccaatattctactaaatatttagtatttgaagcagtatctgcatctaaatctaacattgatctattatcaatacttgaagcaattggcttttgtatctgattctctttattggattgtaataattccttaaatttatcagttaatggtatagttgaagatggattgaaggcaggtagcgcaaataaatgatcaaaacctgaaaatccatgacataatatgacaggatatttgggtatcttagcagaagttaaaggtgcagagaaggagagcattgatataataaagaaaaaggaaagaagaaacgagtatataatgaacttataacctggcccggataagttattaatcacaatttcctaaaaaggaaattaccgagcccccagtaaaaccgccatagaaaaaacatgtagtgagccaaccagccaatgaaacgcgagaatggcataatgggcccgagattgaaaatggcagaagaatccacgacaagcaaattgtgacgggtgaaaaaaaaaattttgggtgggaacgaggaagcgggcaacccccctgcagcggcagtgggaaagttggtgggtcagaaaacgcgaatggtgggacagaatttcattggttattgaggtggcagctgaatgagcgaattgagtggccaattcttcaatttccattttttatagtggtagaatcaccattttacttcttttcatcatatttctactacattttactttatcttgctctaattttgattcatttattccattaaattcttactttcatacacaacaatgatttccgcaagaaccatcagagctgctgctaagcaagccttagctgtcaacgctaaagttatcccaagagttgtatgtattatattatattatattagattgtcatttcaattttaataaatcagtcaattattaagatcattcatactaacataaattattattcttattattattttccaatacaggcaagaccattagctgcaagatcctacgcatccgcaaaggctgcaccaactgaagtttcctcaatcttagaatcaaagattagaggtgtttctgaagaagctaacttagatgaaaccggaagagttttagctgttgggtatgtataatttccttactatttattacttatcaattgatttaatatatctatcaatccaatatgatgatgatatattatttaatataattataattataatattacaattgatttgcaattaatgtcattttcattactactattcattctcataaatacttataactatacttattgttaacatcatctatcataatatttcatatacataactattcattgactatataccattcattattttttattcacaagtttttgtcaaaaatttcaagaaattccacaaattcgagaaatgagaaaattccaaatttcaatttccacccaccagcgaatcaaatttcacctttcattcttaacggtgttaacaatacttataattacaacttatttgtattaatgatagtagtagagatctcatattcttattatcattatcatgaacattcatactaacatattttatttcccttcaaattttattttaatatagtgatggtattgctagagtttttggtttaaacaactgtcaagctgaagaattagttgaattcgcttcaggtgttaaaggtatggctttaaatttagaaccaggtcaagttggtattgtccttttcggttctgatagagaagttaaggaaggtgaaattgttaagagaaccggtaagattgttgatgttccagttggtccagcaatgttaggtagagttgtcgatgctttaggtaacccaattgatggtaaaggaccaatcgctgctgttggtacctcaagagctcaattaaaggctccaggtattttaccaagaacttctgttttcgaaccaatgcaaactggtttaaaggctgttgatgctttagtcccaattggtagaggtcaaagagaattaattattggtgatagacaaaccggtaaaaccgctgttgctttagataccatcttaaaccaaaagagatggaacgatggtcaagatgaatccaaaaaattatattgtgtttatgttgctgttggtcaaaagagatctactgttgctcaattagttcaaactttagaacaacatgatgctatgaaatataccattattgttgctgcaactgcatctgaagctgctccattacaatatttagcacctttcactgcttgtgcaatttctgaatggttcagagataatgctaaacatgctttaattatctatgatgatttatccaaacaagctgttgcttacagacaattatcattattattaagaagacctccaggaagagaagcttaccctggtgatgttttctacttacattctagattattagaaagagctgcaaagatgtccaatgctaatggtggtggttctttaactgctttaccagttattgaaactcaaggtggtgatgtctctgcttatattccaaccaatgttatttccattactgatggtcaaattttcttagaagctgaattattctacaagggtattagaccagctattaatgtcggtttatccgtttccagagttggttccgctgctcaagttaaagcaatgaaacaagttgcaggttccttaaaacttttcttagctcaatatagagaagtcgcagctttcgcacaattcggttctgatttagatgcttcaaccaaacaaactttaaccagaggtgaaagattaactcaattattaaagcaaaaacaatactccccattatctgctgaagaacaagttccagttatttacgctggtgttaacggttacttagataaattaccattagataagattgcagcttttgaaactgaattcttagcttacttaaaggctaatgaaactgaaatcttagatgcaattaagactaagggtcaattaactaacgaattattagcaaaattaaagtctgctactgaatctttcgttgcaaccttctaaatttaattcctctttaagcatttaaatgaattaaataatactacagagaaaaaacattttagtatatttttcacattatttattccatatttatatttatatttattttatgatgaaatgataagaaattgaatctttttgttttgaaaaattatttcataaatcataaaattattatattattatttattttattttatctttataatatacttttttagaaccttaagatccattttatttattaattaagtctaatattcaatttattatttaaacttgtaatctttttactttttttaaaaaaccaaaagtagtaattttcacgttacatgattttatcatgagaaattattcagtattatttaatttgaaatttgccatttcttaaatgttaagttaacattatacatatcaatctagatacttatcattcaacaaatgtcagaagaaataccattaactccacaattacacggtgtcgctgatgacttaccggtgcgaattactaatgatgaaatgtataggaggtcatcccaatatagatattggtcattcactaaggaatcattaacagatctacgaattaaagtcaataacaagggtaaaactatttttgaaaaacgtatttttaatctcgatgatgatagtgatatgcttattaaaaaatatataacagagaatgaattcaagggtattaattgttcagaagaaagagagattgttatttattatgcacgtaaatgtcaagatttatctaattttttcaaatttacaacacaagttagattaactgcaatttcattcctttttaaattttatttagttcattcagtaatggaatattatccacaacaaataatgtatacatgtttattcttaagtgcaaaaagtgaaaataattttattggtataaaaaattttagtaatgcaattccaaagacaacagttgaaagtattttacaatatgaatatttaattttagaaacaatgagattcacacttacttgtcatcatccaatgaattcattatatggatttttcttagatattcaaaatattttagttaaattagattttaatagattatcaaaagattatgatacatcacgaaagataattaatgaaagtgttttcacggatgctcaattcttatttactcctccacaaattgcacttgctgcattatatattgctgatgatgttgtttgtatgagatatttaatgagaaagtttggtgttaaaagaagacaaatgttacaacaaatggaacaaaatgaaaatgagaaagaaaaagtaattgtaaagaaagaagatggaattaatgtggatgatagtgtaactgtgaaacaagaaaaagatacagaagaggaacatgttactgttgttggtgacaataagacagtggaaggtacacccgttgatgtaaagcctggcatcaaattggaaccaaaaagtcaatccgaaaccccacaaactgataccgttgaaaccacggatacagttaaaccaacagatgagaagaatgttgatgatattgatgaatctattaaattagttgatgacaaagatgaagaaaagcaagaagttattgaagagacaccaattgaaaaatatgaaaggattttgaatatagttaaacagtgtgctgcagagatacaaaataagattgatccaactgttgaaagagctaagattgtatctcttaaggcacatttttgtttagatcctgttaaatattttaaaaaaatatcaaaggataaaccagtagttggtaatagtaattcaatttcaccggattctacaaccactttatcaacatcagttaaaagagaagctcctgatgatgaatcaaataatttagatactaaaaggattaaacttgagtcatagatttagtttatagtttatataattttttttataattgtatcatatagtttacacagagacattatttagataattttaggtatagcagttatcttatccttaataccaccaacgtgataacagtatttattctttgaatctatcagtacgacttcttgaacaaaatcgcttgaaccacctcttaaaatttcaaatttaactttaccaattttcattgtcattttacctgatttatggatttgtattttaccaattttaccattttctccaccttctaatataggtaaggaacatgggaattgcataaagaataaattattatttgaattattcttcatatctaaacttttcaaacttttacttaaattaataaaatcatcttgagtttgtttaatttcttgcttttcttgataatcattcatatgtaaaccatcatcatcttcattagtactatttggatgaatattaatatcacctaacattaattcaggagtttgagatctagatttagaatctaaaccaacagtattctctcttgttacaggttcacttggaattgttgaacctgcattatgaaattctgtctttattgtcttatcagttttaatttcttcaccatattctcgatgttcatttctttctgctctaacagggaacagatcagtatctaattgatctatctctacatcattttcattattttcaagaattgtctttttactcatatcaattgcattatcatctaaatctgaatctgaatctgaattataattaccaaatgcattagttttaccgttttcttcctttttaattttagatttatccttatttttggattttaatctctctaataatggattgaacgcacctgcaccgggacttgatgaacgcatattattaccactattacctaatgatattgtaccttcacttaaaggacctgatataactaattgagttcctgataattttttatttgttttattaccaggtccatttttcttatttgctaatcttttactattcttttcagctaatttattaacacctggtgtattaatctttgatgtattttctctttcttcctttgatttacgtgagacaacctttggtttgaatttaagtgctggttttacaccagttggagttgtacctgtacctgttgctgtgtttggtcttgtaatactatccaatcgttttgacattgtttatttatgtataagaaggggatatattgttaaaaaaaaggcccaaaacaatctgatggaaagattaatgcagatactaagatcggttctactgaaaaaaataattaatttttcatgcaaatttttttttcaggttttccatactaaaaattgttaaacttttgtttatttgttggtttgttttagctagttagttaatttcaagtagcaaagataaatatatcgatatggcaagaaagggtaagaagataacaaaggaagttgaagaagattatggattagatgaagttgatgcatttgcaaaggaaagaaatgatgaattatatgaaaaggcaggattaaatgataaaactaatgaattaagttccgattctgacgatgaagaggcaattgaaggtgttatggatattgattcagatgttgagattgaaaaatataaaaagaaatttacgggaccaattgatgaatccgatgaagaatattttaaagatgtgaatgaagatgaagatggtgaaggtgatgaagatgaaactactagaaaaggttggggaggtaattattatggagcagatgaagcagaggatgacgaggatgagaaattaatggaacaagaagctttacgattacaaaaaaaacatatggaagatttacatatggaagattttatgttagacgaaactgaagactggaaaagtgaaagtaataaaaagagagatggtcaaaaaattgaaagtgaaattgaagttaaagataaattcaatgaaatgacaaaaatgggtgataaaaattcaagaatggaagcaataagtaaaagatatccagaatatttaccattagttttagagacaaagaaactacagccattatatgaggaattaaaggaaaatcatgaggatgcattagccaaagtacaattcaaggcattaagtttatatttaggatcaattgtttcatattttagtgttttcgttaataaactagcagctgatgaaccctttgaaatgaaggatgaagatgttatgttatctattttaagtactagagagttatggagacaagcaagtacattagttgaaggagaagaaggagatgatgatgaagaggtagaagaaggaggagaagaagaagaagtagaaatcgaagaagaacaagattctgaagaagttagtgaagatgaagtatcggaagatgaagatgaagatgaagattctgaacaagaagaagcagaagaagatgaagaagactcagatattgaagataattctactccagactttggagaacttcgtagtcttagaacacaaacttccaaacaacttgaagatatggatgatattgatattgaagataagaaagtccgtcgtaagaacttacgtttctacacttctaagattgataaacgtgatgcaggtcgtaagacagtagatggtgatcaagatgcatattacgaggaacaaaatgatccaaagaacaagaaacctgtattttcctccagagacagaggctccaagagaaacgaccgtaggtccaagtccaattccagaggtagatccagaagatagtattgtttgtagtatataacacatttataaagaacttaaaagacacttaaaagacacttagtattaatattaataagagaaccttccgaaaagggaaatttcagctgcatgaaaaattttttttattttttaaatttttcactactatatagtatttcttcgattaatattataacttagttatttctttctaacatatctatagacaatgtccgttgaagaagaaagaaaaccagtcactgttgataaggagattccaatttcctatgatcttggattactcgcagcttacgatcctcaacctttagatcatttaaaagtttcagattctaataagagagaacaatatttaaaagatattacaagagataatgtacaattacttgttaaccaaattctttccctaccattacaaaagaaagatactatcacccttgtaacgcttccctgaaccaattgttaaacttccaagagaaaaatcaattccaaaggctaaagaacttacaagatgggagaaatttgctgcaaagaaaggtatacataagaaaggtaaagaaggtaaacttgtatttgatgaagaaactcaaaaatgggttaataaatggggttataaaggtattaataaaaaacttgatgatcaatgggctgttgaagttccttcatcatctgataaaactaatgatcctgaagctttacttgatccaagaaaacttcatagagatgaaagaaagaaacttcttaaaagaaatcaagctcaacaaaagagaaacagggaatctaaataattgttttataatgtttaattggtaaatataaaaaaaaattcgtatctgtattaatatcatgtaagactgtgattagaatcgacttgtatattaatattatactgtattattatatattatacttgattcaaagtggaaaattaatggtatctatacttagaagtttgttacaactaactatatttaaataattttttattttcaattttctttacttctatctatctctttctttcttttcgtatatatatgaatcgataaccatgtcagatgcatatgacatgatgattgattcattgattcaatccactgaggaggaaaaacttgaaacaatgaaatctaaagaaatagtattacaacttcaaggattcttaaatatacaatttaatgatgaacaaatgcattatttgaaaagaaaagttcatcgtaaaatacgacattatttacaacaatgtaaaagagaacatgaacttattgaagaggctaacaaacaatctatagataatctattattcccattcataagtgctaaaatcttctataaaatatggatagaattactatataacaataatattggaacatttgagaaagagattatctctgattctctacaggaagtgaaagaaacgaaaactaaacaaaataccatccctcaaccatcaatacaaccacaatatgaacctagacatggaatggtaaggaaacttctaagagataatatgtcacttttaacatctattgatcatcatcttgatataagtaattataatatatcaaataaagaacaaagacaaataatgaaaccagttttcaaaagacgtaagaagtatttccaagagcaagagttacaagaacaaatcaaaagatctacaactgttacgaatcgtgtaatgtataactgggataaagacatgcaggagtttttaaatatttattctccacttactataggtgaagttttccatatggtatggagatatatccattatttaagaagaatgaataatggtaaattaatacctgattctagaatggaattcttctttaaagataaagattgtcaaaaattaactagaaatgattatttcggtttagttgctaaacatagactggaaactgaaggatttgttcaatatgatggattaagatttgacagtgatggttcattgattcctgtggagaagtacaatatctcatctgagaagttaaatgaagcaattgaaaaggctaagaaagatatgaatgttccaaaagaatttaccaagatgttaaaatttaaagatagaataaagaaaaggagagttatcaataaagttgacaatgatactccatctgagagtgaacagttgtaatgtatagtattattatatctgtatctgtatatcgatgtaaataaagcaatgtattatatatatagccttttgtgatgacatgatatttttcagtctgttatatactaagatgagaaatttcaatgtttattcatcataactttcttttctgtttgaattggaataccacaaaggaaatgcagtttattggtactgcatttgaagactatgtcttggaccagtttttgaaagttcaattattatttgatgaatcttacaaatatgttaaagtatcacaaattaatggaattccacaatcacctgttattgcaaatacgagtaaatcaatgtttcataaaagcagttcattgatgaaaagtttaatggaaaatttgaatgaactgtcaaatattactcaaatcgatatgtcatctgagtttaaaaagaatataataaagttcttgtcaatacataaagcaaattttaaaaactttcacaattgatacgttaaattctgaatttcaaagttttttgaaaaatcaaaaaggtttaagtacaactgatcctcaattttatattcaaagtattcaattagttgatttattgcttatttgtaaatcatcaagtaatgaaaaaaatcagttgattaagattagaaattcattattagattgttcttatttacaattacctactataacggatgaaaaatttaagacttctatatgtcagtcttttaacataacaaaggagcgattaattactaagattaatacattaaacactgttatttctaaatcacaaattgtaaatttcttccaatctggtgatgttctatcaaatacttatactattaatgattttgaaaatccagaatattatgagaactggttactaaaatctagaaatttagagaatgatatgattacattatttactgatccaacaataccttctaaaaacacaaatatctctatcgttcctaatcaattaagtgatacaatttcccttttggtagctatttcacttaattcaaattcttcattttttcatggtttgatcaaatgcatgcaaatatggcaaataaatcctttctatattcagtttaagtttattgaaactgctgttagtattagtaaagaacagaatgatgataagattaatccagaattagttgaaaaagcctttaatttatcatatttagcaatgccatttcaagtacaatttattgaatggcctttaaatgaaaagaaaaattttatgtcattaagtatgaaaatctataatgaatcagctgaaactatcaaaccttgctttcgaatgttttttccaagatcaaaacacatttactattgctctatcatttttaaaattattaaaattgaatctgaaaaatgtgaaatctgaaattaaagaacaattggtaaatattatacaacaaaggttatcatctcataaggataaagctggaattagtgattatgatcaaaaattaaaattagataatatggttaaatttctaagtttggtttcaagagatatcaatttattatttaattggaaatccaataataaagatcttaatctttcatttcagatatttgaaattggctccaaaattttaatgagtccaactttagagtatatcaaaaaatatgttaatgaattaaagagtaatgatttcaatatagtctctaatagagagaataaagttaatttcggtagttttattgatcttgtaaataatttgaaggcaagaacaaattttaaatatgattttcaaaatgaaatatttgatgatttctacaaaatagttcaatcatgggataatgaaatgttaagtaaaaccaaaaatattatatctagtgataatcttgtaagattggatggttgttcatattcttcaagtgttcaaaacttgatacttctgtttgaaggttatatcaagttattagacagtttcaaatggagtaatgagcttcaatcttcagaacttaacattcttttatataaaataatgattaactcaatcaaatattatcacagttcaatgattaagaaactcattgaactaaataggtttacaaaaagataataaatcaattgactcatttgtttgtttgaataatatttacaatttattcctctttgttgaagaacttcctaaaaatgaaaatgttttgaaagtttcacaatatttagtgaacaatgggaaaaatgaaaagaaaaattcaaaagtttcaaataaatatgtctctgtattgattaagaatgcagaaaatattgaagattttagaggtaatccaatgaaccttatggtacgactaagtggactaattaataatgaaactcgtgtagttaataatgattataatcctgattggtttgaagaatttaatgtcatagtttcaggtaatactaaaatcagtagtgattcatcaaagggtggtaaccttaaaattgaagttgttgatgcttcctcgaataacgtttacaaatcagtgttctacaatgttaatttgaatacggaaagtatctttaaaaatcaatcagagaaaatattactgaaaccaaaaagtggatcattgaacatcaatgtaaccgttgaatttgagaaaaatgatcctttattctatattctcatctgtaagaaagaacttgacaattcaatcaagagatgtttgaactatttaattgaaggttatcttgatgatattaaaaaaatattcacattatccaacttacagaaaagtcttattgaaaatccaatcagatctgaaaacgattttaagaaagttacaagatccatacctcgatacacttaattggtgattttcaagtgaaagttctaccacaagcttataataatttaggaaactaaattatttgataaattgattgttgaattctgggagaaaattttaagtattgccgaaaacttattacttccaagactttcacttataaattatatgattaacatgaaactcaataaaaataaacgaaagagtaaaagttcaggtaatacatcttcaatggtatctgcaccatccggcactcacgttagtacatcaaataatcataatcaaatacacgaaactacaagggaggaattgattcgtgtagttgaatggacttataaatttcatgcaatgttagaaattcctgatatgatcctccaagatggattagtacaaccatttgctgactttaatgaaatcaaagcacttttccatcatccattgaaaaaactatgggaaatgtattattttgattggggatattcaagtcatacgatgatgtcacgtctgagtaaaggatcaaactacgatagaagcagatggaccaaggtatcaagacgtaaacaattagttttaagaattatactggctaaaagtactgatcagttacagaaggttaagaaagttttggaaagtgaacaacgttttgaaagaactgttaaaactgaaattgaaattgcatatttacaacaattcctctagttactatttatgaacactatttatttatttatataccatgttactgtttactatttactactatttatataccattataaaatcacttatatcttgtaaactaagctcgtatagagtcatgtatatcattacgtaatccaatataataacactctcgtatcagatgatagttctgtttcagcagcaatatatcactctgtttggcaagagattctattagttcaacagcagatataaatgacagatagtgttcttaagcagaggagaatgtcatccattcctaagctaccggatgacgatatggatgaagtcattacaacaataccagataacgaaaaatctttacctccacttaccaggtagtaataaaccaattgatatatcagtaacttctgataattctggtcaagaaggtgatacacgtagtagtataagtgtatcctcttcaattagtaccaaatcttttattcaatgggaactctcaaatgaaatcaatgcccgtggtatcagctacaactacaaatgcggttccattaaccgatgactccggactaactaaggatgaagcagatgctgttaatcttcatttacaccaaattcaaaaagataatatgaaacaggaaaaaatggcaactgatatttataaaaatgaaactggaagatcagggtacaatgttggttcatttttacaaaatgttagaaactatggaatttacagatctcaaagtgaccaaagtacaatggaaggggaaaaaaatgtgagtgatgcaaatgaaggtttggatgatggtattaaatttgaaaaggataagggtactgaaatgttatcttacagaaaatctagaggtaagaatggcccaacaaatctatctgttaatactgaaaccaattcacctatatcggcttcaaataatggtagtgccacaattatacaacatagaaaaacaagatctataagtacccctcttacggcatcatcacttcaaacagatcctttagtttcacccgcttcatcaatcacatcaccaactgtcaccgggactacaccagttgtattcaataaaacaaatgaagtggattataatctttatgttgatgaaaagtatttggatactcaatacagatatgctacggagaaaagaaatgaagactttcacaatttattttccgatgttccagctgatgatagattacttgatgattttagttgtgccttgaagtaaagaaattttattgcaaggaagagtttatattcagaacattatctttgctttaactctagtttattgggatgggttaccaatcttgttatatcattagatgaaatccaaaaatttgaaagaagatcaactgttggtttatttccaaatggtataatacttgaaacaagagaggcgaaacatatctttgctagttttatatcaagagattcaacgttgaattttattgaaacagtttggtcaaaatccattagtttaagtaaaaagaatcatgaaaaatctagagattttgaatcacttagatccaaatcatcatttgaaggagtcaataataaaggcaaattgctgtcagagagtgatatttacactatagatgacgaagaagatgatgatgatgacaatgattccggtgattattatgatagagatgatgtgaataatgtcacttcaagtgatgaaagttcaaataatttggattcattaaatgagatttctggtgatacctaataaaacagaaaagaaacctaagaagagtaaatccaaatcagccaaaaaatatccaggtccatataaacatgaaccttccacttatgtttatgatgaaaaagcaaataacgaaaaaattgttttagataaagaatttgaggctccattgggattagtgtatgacatattttttggagaaaatattgagttccataaaaatatgatgattatgaatgacgggttgaattttacagattatggtggactagcaggagaaggttgcacgagatcatttgaatatgataaatcacttaattttccaattggtaccaagttccactcgggttttttgtaccgaagagatgttacattttgatctcaaggattatgttcaagttttgaacataagtaaaactcctaatgttccatctggtactgcatttgattgtaaaacaaaatatactttactttggtcaaaggaaggaaaaactagaattattatcagttttaaacttgaatggaccggaagttcatggtttaaatctgtcattgaaagttctgcgttatccggtcaacaaaaggctgctggtgatgttaacacagaaatgttaaaggttcttcctgcaaaaataattgaatacaatgttcacagtgaagatgaatcagatggagagtcatcttccgtggagacagacgttgttgactgctgctagaaaagccaaagccaaccccaatagcaccagttatcaacaaccctatttttgtggaagatttcttggtaaaacaggcaatcccaacctctattggtacattcaaaatctcaaatctctataccgctttttcaattgtgataatcatacaattattactgatcatataccttttgataattaccatgaatttaagtgtagaggtgaaacaacaaagaaacatcttgtctttattatcggaaaaaatccaatcattagataaatcaattgtttaatttacctattatgtaatatttaagagtgacgaaattcagtaactatacttctgtacgataaaatgaatatattaaatcctatttttaaaaaaattatatacaagaacgaataaataagcgtataaacaagccggttgtcactatacttcgttttaagttgccaaaaattgattattaaaattcatttctttactttccaaaatttccatgttatcaattgtaaaaactgaaatcttttcattatttgcatcaagctcaaatataaacacacctgttaatacccttccaacagatgtatcattactggttgttggatcaaaatttttagctaaaccttcaagagtttgtaatggatttggagatttcaacagtttggtccaatcaaaatgatcaagactgtaagatcctaattttgcatcagttgtatctttatcctgtaagatgtgcacatcctgaataacatgtcctccatttaattttaatttttgttgtgtatttagaaacatcttgagcttgttttggaagagccttcaacagctccgttttcatctacgtggccattttcgattacattttcatctattgataagtttatgagttccgcagatgacattgaattagtcggttcaattattttcaaatttgtgatatgaattttggattcgggattaagataaaacagcaaaacaagtttttgaattgcctttaaagtacttgtatatagtacgggtcccttaattgttggtatctgtggaaatttatttggtaatattctcataattatgtcctttgacatgaactcacatggtattatcttggttaatagatttggaactttgatttgtaacatttggaccattgttcctagattagcctttctttccaaatatttcttatctatttttggatctttgttatctttatttccttgattattatctgaactattatcactgtaatttagtatatgatttataaatacactatttctttcattcttaacaattgatacagatggtacatttccgatgaatttgtgatttcctaataaatagaggtttcttctgatttacttgtaccataccttgtatatttttggagtaacttgggataaacattgcatttggaactagttccatagggcgttttgccgtaatctattattgctttttcgattaaagttaacttttggaattactaatggtaagttaccatagcttcccagttgttagtttcaccagccccatagtcaaaaaggtttgttttatcggtcgtttgttgctattgaaatggatatacttattgttctaaaaagaaatgccaccctattcttttaaaggattaattgattcatgtcctcaacatgaattttgcaatcggtggcgccgcttttatttccgctttgggaaattataaattattcattatctttatattaggttaaaactatacaatttctatgatcatttaatcatttatatattcatattaattttactcaatatattcatattaattttactcaacaacttagttgtatttccaaaattcaaattttgatcatctacacttcctgcctggttcaatccaaatttacagagaaacgttattttttgctaatttttctttatcatgaagttcaatatctaacttgtaaatttgaatagcttcattcatactttttatcaaatgcatcaatatcaaaaacatcctcattgtcatttttgtcttttctgaaaaatctgaaagcaagatacagctctgataaatgtctatctctagctatttcatagaaaaatttggcagtgttttggtgatctcttttgcattgaaatatatcttgatttataatattccaactcatcaacttcaaaggtaaaatattttaaatgatataatgctaaataatcagcaattttttccttaaattcctccgagctttcaaaattattcaactcaaatggaataatttttaaagatataaaatttccatatttcttagcagtttgtattatctcattatgataatcgttctcataaattactggaagatcttcatcttcaataaaattattcataaactcataatattctttattaaaatcaattatctcgtcttctaaaactttacagtggttattaaatggtaatattttgttatctggcccttcaaaaagttgagtaaaatcaattcttttattatacttttgatgatgacaaaaagctttacctttgaataattcagtttttacaaattcatcgtactgttcattttcaatatatgacgaagcatcatttgaatcatacaaatctactatttccaccacgggttcataatcaaagattgaagtacaagtgtctttctcgagaatatttccatcatcttcaaccacttcaaacaagccaatagcaaattcaaacaatgcacggttattgctatccaaaggcgtttcagaagaatcaattgcatcacaagaattaaacacttcattctcaataggcgatggtacattatcaactgacgatgtttttccactattttctgcattgtcaaaaataggaggtgatgaattgattatttctggaacaatatattcactagattctaaagaattgttcgaaattttacctgaatcacttgcttccaacttctccttcataataggtgataaattaatcattgttggacttgcattattcttagtttttgctttgagtgtagagcttggaaaaagatctaagataccaacgttttttgtaaaaacatcggctgagtttgatttccatgtttcctttacctcttgaactaaaaagttgtgagcatatgttaaattgatagtattttcaagaattttatctgtttcagtaggtaatgctttttttgaaacattaatcacatgatcagttacttccttttttgaaatttcagcagaatagattaattttggagattcgtcttcgattggagattcaaatgtatcatgcgattctacagagatttcctcaactttttcagtatctttttcttgtccattggcattttcattttcagtaatagttgaatcagataaaattttcttttgaagttgtctctttaatttagatttaagtttctctatttgcaatctagtaaaagtattataatccaatgagctttgtgtaacaatagcgtatttttcaaaatctgactgggatatttgtggtttgacaaatatcatcatgtagctcttgataactttattcctgaagcctttttcacaattaaaatcccacccttttctaattattttgccatcaagctcatatatacaattctctaatttaaattcattaccaaatatttcatttatgaaatgatagaaacctatttgaacgttattaagattaatataatcaaaacaatctagaagccagtcttccgtgtaaaaatagctatgaattttaacaaattttttgtttatttgagtaattctagctaaataaattattatttctgatggattaatatatttattcctgcccataaaatttatagtaaaatttggcattctaaattcgatttcactaccaattgatatttgaatatcttcatcattagattctgcaaaatgatcagcatctgtaatcaattcaatagataaaggttcggcattatctttcaacatactacttaaacaattcaatgcagtattttctggattaattatataagatacaacgtcacgtctatttgataaatccatttgtgctctatacaatggagatgggaccattccattttgaccagtaatcaaaaaataaacaaactcagtatatgttgtaaaaccaggtaattgatgaatgaagaaatcatctgaatagtatatctctgaagtttcatattcactcattttgaactttatctccttctccattattgttttaatctgatttacatcaaagggtacaaactttttagcatacttatttgaacttttcttaaatacattaataatactagatgcattagctttgaagaatgggataattggagtatcatcctcattataagttaaaagcatattacgataacaaggttccggatgtttatcattgaaaaacattgcaaaatatgcataattccccattgagaatctccataagaatttaggatttcgaagatataattgaacttcccctggtgatggactaaaatgaagaggagttacattaaagaattctgcctttaagaatggtgccttatatttatgttgtaaacaaaatcttatcaaacaccaagtataaagcataaatatttgtctctgtaatacagcgtttgcagcattgtgtaattcagttgttacaaaaccaaagtaagatccgttactagcttgaataaattgtgatgttccgaaaagacataaagttgtgggagcaggattaattatttcttgatacaagggataaattggtgatcctagtgagaagtacatgattcttcttattctacagtatctgagctatcactaatagcaaagctctgttaactgaaatgaatgcatcttcactagagtatgtacactgtattgttcatgtatttgaaaaaggggcattttaaagaaataataatttttttcatctttttgccattctttgctttctttcactcagtgggtgtcttcatatttattatatcaccatatggtatatatctgatggattgatgtactttagtacaaagagaaagatatatagacaacaaacaactggctgctgctgtcagggaaatgtacacgtgcctctgtaactttcaaattttttattatgtaatttatgatgtaattaattggaagcctacataataaaaaaaatattttattcagaacattaaattatcacactatcgatatttctgatgaaaagattagagatctcgatactttcttgcagatgatactgttagaattgtctatttaaacatatatcttaaacatatatctaaactttgaactacaagacgagaaaggtctgagtttttgtcatgaaaccacaagtttatgattcaggagatccaaatctcccaaatctaccagatactgatcaaattctgtggtcagattatgatgattatttatcaggaaatgtatccgatgaaagttattcaactgaacaaagtagtgattatagagaaaatgatcatgctgataggaaaagtgtgaaaagtttgaaaagtatgaaaagtgtgaaaacacttaagagtaataaatctaagaagaaaccttcaaattctggttcattcttatcgaaaattaattcaagaaaatctgaatctcatagtaggaaaagttcagggaaatcatatgagaagagaccaaatttaacttttgtgaaagatcgtaatagtattgattataataatgctttattagattcggatgatgatagcatggatgaaaaattcaatatttcaaataatcacaaacaaaaaaggaatcaaaatcaaggaagccgtaaacatagcaatacatcaattggaaatgaaactgataaatcaataaattctgaacaagataatttagatcttagtagtagagaaagaactagctcaattttcagtatgatacgactgccaagactgatgacaacaactagaagaaaatcagaattactaaattcaccatccttacaatatcagtcaaaggctaaatcaaattcatcaagtaaaaataatacaccaatccttcaaccaacaagtgcacattcatttgctgctggtgattcgggaaatcatagattacatccttccttcagtagtttaccgccaacagcttttgatgaagagctcggtgatgttgatgctgaaaacttttatatggatagagatgttagttataataccaatggtgttgaaattactaataataatgataatgatgatgaaaatgaagatatgggtaacatatctgatgacgaacatgaagattatgatgaggaagaagaaggtgatggtgccgctaataataaaaataaaataaatgctggtgataatgatggttatgaggataactattatgaaaatcataactttactgatgaaaaaggtgactattttagtgacgaacacaataatatgcctaaagctccaaatattattgttagtagaataaagagtagaaatgccaatcctgaaagtttaggtcatattgaaattgatgataaacatccaagaaaaataatgagtactgatactgattatgaatctgattttaacttgccacctaatacgtattcatttcaacctgaatctattttaaggaaatctagaacgagagaatcaggatattctagtaatataccgagtaaattgaatacaaatggatcagatgctgatgatgaacctgaagcaattgatgaaaacattgaagaatctgttaacaataatgatgtagataatgataatgagtatgatggtggagatgatgaagatgaagagaatgaagagattcaaaacgaaaacgaaaatgatgatgaaaacacacagcctaaacataaaagtaagagtaagagaagaagagcagctagaagacgtaagagaaggtctagaaaatatgttggttcacaaagtaaaaaggaaagaacagcatgggaaccgggaattgatttaactactacgaatgttttcctgaattcaccaggctcgattattacagttactgattattccaaaacaagatatagaattagtcattatgatttatattcagagatgaatcctaaatatagtaaattttctgaagatgatactattttaagtgcacatgattttgatgaagcatatgaggaaaaatcacctgaatttaatgaatatattgaatacatgaataaagtaagtgattcacattatgaagttgaagaagctataaagaacaaacctgcatggtctcaagttagatggattaatgttaatggattatcatgggaagctatcagtattattggtaagaaatataatttacatccattatcggtggaagatctggttgatattccacaaagaactaaaatggatatatatcatcaacatttatttgttgttatgccattactgaaattattaaaagttagaagatactcagatgataatgatgagacttatttcttaagactacgtcaaaaaataagaaactatatgaatgaagatgaactaggataaaactagaggagaacaattaagaacctcagaaagtaatactagaccaacacacttctaattcaacaactcaatcaacacctcaaccacctgcatatgttggacctacctcagcagctaatggagattcacaaccaaattcacaatcacaatcatcatcacaagattctaatttaaaagaaatcgatacagaatctacatatccagctccctaaaataattactaaaacaattgcaactaaggaacaattaagaagagaattttccagaagttcaacaaaatcacaatatccatctcaaaatcttttacaggagaaactcgatcaaagatccaataatcctaattttacccaaagtggtataaatgatcgtatattacctagatcatcgagaactatgaagaaaagtatggattataatacagttgaagaacataaattagcagttgaaatagagagggcatcacctggacgtagactgacagatttaacatttattaaacctaaaactggtagatataaatcacgtatggacaaaattgataaaatgagaccattaatgtcaaaatctttagcagttggagttgaacaagtttcagtatatttaacatcagatggaacagttttatcattttttgaacattcagcaatggaaattgagagagcaattttatcaagattaagtgcagaatatacaattttaagagagacatgtaaatcatcaattttatttcattcaatacttgatgcaaatgttgatttactttatccagttgttacagcatatacaagaattttaaatgaaaaggaagttgaaattttaacagctgttttacctgatttacaacatacacaagaattacatttaatgcttaatgaattagcaattttgaaaaattcaattttaccaatttcttcattaataactcaattaaaggatgttagtattgatattaattcaaaatttattgatgaaagttgtaaattatatctggcagatattggtgatcatttattagcatttattgatgaaattaatagtatgagttcaacaattgaaaatttaattgatttaatttttaatacattaagtgttgaaacgaataattcaatgcaacaattaagtttagttacagttttatttttaccattaacattttgggcaggttattttggtatgaattttaaaattttcggtaatttagattatagtgtttcatttttttggaaattagcaatacctttcactgcttgtatgatgattttagttatgagaaattcagtttggagagctttattaagaataatggcattgtttcaaaatggttggtatcatttacaaaatatgattaataataatgatgatgataaaagtagtagatttaggagacataattttgatgctaataaatttaagaaatttcgtaggaaatctcgtaagaatgaatgatagaagttataagtagttttaatttaagataataaatagatttataaatttatataattgttgttgaaaaagatctagtagtaatctaatcaacattcacccagtgaagtaaaataaaacggaaatgcaaaaaagataaaaacccaagtaccaagtaaaataaaaagagtaaagagtaaaaagatttcatgaaaaaaaatagaaaagttgttaattatttgagaaaagtgtttataggaagatttaatgattcaataactttccagataaataatagattaaaatttgataacagtatatttgatttttttttgttttttgaaaattaatagctgtgttatggaagtttgaaatatattgttattgaattttgatttcaactattatttatttattgaaatttaaatcttaaatctgaaatttgatctgcccaaacatcagtatttgataattcaaatgaattaataaatgaatttgtattttcaacagttgaattattatcaaataaagaggaaggattgtaagttgtacaataagactccattgcagagttattattattagtattattattattggtggtattaataatactattagttgaagaaatttgatattgtaatggaattgaaattggattaacatttgaatgatcaacatgattattaatatgattaaattcatctttattattaaacatgaactgatcatcaaagttattattatcaatattatcaatattattaatattttcattattcaaatgatgttcataatcatcaaataagaaaacatcattttcattatgactattgttttcaatatttaaattttcattattttcattattattattattattcaatgaatcaacaattgaattaatataattattttgattatttgagaaatggattaaatgttcttgatctaaagtgaaaccattattaataccattttcaactaaataatttaaagcatttaaatctctattaataattaacatatcaacaattgcagtataagaagtaaaattaatatttgggaaaaaatcataaataaaatattttgattttaaaaaatttgaataatttggatcagaattaactgcttttctaaatggacatttattgaaaagtacaaataaaagtgtaataccaatagaataagcatctaatttatcagaataataataatctgaatcatttgatttaattaaagcttcaggagccatatatttttcagtaccaacgttaaaatctgttgatttaatatatttagttgataacccccaatcacataatttaattgtaccatcattcattaataagatattttcaggtttaatatctctatgataaataccttttgaatgagaataattaataacttcaattaattgattaataaaattaatgaaagctaaatgatttgattgaatatttaaacctaaattagttttattatgaattgcatcatataaatcacctgaatctgcaaattccagaaccattataaaatattttttagtttcaaaatgatctaataattgagtaatatttttatgataacctaattttttcataattaaaatttcatgattagccataattgaaacaccattaattgattttttcattgctttaattgcgacatgagtattagttaaagtatccaaagcgcaagtaactttaccgaaagaaccagtttgtaaattacttataaaagaatatctattatttaataaagaattacccttttgatattgtaaataattatctaaatttgatttaaaattatttgcaacattattaatattattaatattatttaaatgagaaatagatgaaatagatgaagattgtacagctgagactgcattcgaagtcatagcagacgccatttgcagatgattttaggaaggaaatccaaaaagaaagagaagagatgagtataatctacgggggcaaatggaatggtggcgctatttataaaaaagagagataaagcctcaatagtctcgcgataataagaaatttctagaatgtgtcatacttcactatacgataagggcgataagggcgatattcactccttagataagagttattaactgttatttactgtctttatttatgtttggtatctattactgcttgtgttttaagttaatagtagtaatagtagtatattatagtaatagtatatagactatacagtaataccaacaatatacacataataacagtagataataaataataaatgatcaccccgtactttgtttttgttgagtcatcaacaattttatttttatttatttttatttatagtaatttattttatcgttacgtaatcatttgcgtcacgtgactgtgcgcaatgtcacgtgcaaggggcatttaggatattgatttttcaatatctttataaaatcccattgcaaatgcaatttcccaaagtacaaaatatggtgctaaaacaagtggttgtaaaggatgtgataaaactgctggtgatctatgttcatgaattccatgtccataaaattgtgcaatccatgaaaaaatatgcattaaaattgcatttttattacttacaccacttttctctgctccaatttccattaaaaataagaaaattgttccaattatacccattgttaaatgcattttaatataaaatattgaatatccaatcattacaattcttgataaatttggtgaataatttgatgctaaaactaatgatgaaaataaaatttgtggtatacaaattatatgaattaaaacatttgttgtattacgatgatatttcttataaaatgataattgttccttaagtgttaatgccattgtatagtataatatataatataggtttgttttatatatactctgttaatcaattaatcaatattatactttagtaattacaattacaaaatttattctttattctttataaaaaacatactttccgcgagtttttagtttacctcatcgcttttttcaatctgtttgtaattgattacgtaaattaaacatgaggggaaatgcatcgtatgatgtttgtctttgtttataataggttgctataataacttattaatgttttaaatacttttcatagtaatgtaaatatatactagattattggtagaaacattaatagtgtgtaaaataacaattttcaaactaaaaaattttataaatattcaattaatagtaaagtaatgaaaattttaaaatttttgaattaataataataataaaaaaatcacgtgaccttgtacatactacacatatctaatcacagggtacaaaaaacaacaatttccgatatagtgtaacggctatcacggtccgctttcaccgggcagacccgggttcgactcccggtatcggaacttctcttttaagcctggctagctcaatcggtagagcgtttgactcttaagtattgatattttaaccaatagcaatcaaaaggctgcgggttcgagccccgcgttgggcttaattttttttaattttgatattttttttttcaataattacgcgttgacgcgttgaaaattcatcatgatatgcatgaattgaagaagatggcaattaatgttttactttattttatttcattctataaaaggtctatttattaaaaaataattgagatatctaatttagaataatgaataattataatgcatatggtgatggagcaggttatggatctggtggtcatttagatggtggttttgataattcaaataattcacaatttgattcaaatagtcaaggtggtaaaccaagatatgcaaaacaatttatagtacctgtaactgttaaaatgcttaatgaagcaactttagaaggtggtcatgatggttcatattttactcatggtgttgaattatcttatgtacgatttattggtgttattagagaaattaatccagaggaaactcatacacgttattcaattgaagatggtacaggtttaattacaattagaatttggaataatgatgcttcaactgctcattttgataatgataatgataatgaaggtgatggtgatagtaacaataataatgaatatttaacaggtgattatgttgaagttgttgcaacaattagagaatttaataataaaattcaaattcaaacccaaaaagtttcaaaaattaaagattttaattttattccttatcatttccttaatgttgctaaaaattatcttactataaataatccaaattctgaaatatctaatccaggttctaaatctgatggtttattcgtttcagataatgatattaatagtcaagcaaaatcttcagctactaaatcattacctgatcgtgtactggattttattaaacaacatagtcaaacaatgtcagatggtgttcatactcaatttatgagtcatgaattaaatatcccaattgatcaaattactgatgctgttaataatttagttgatgatggtcgtatcttttcaactaatgatgatactcaatttttacctttataagtattataagttctttttgtacatgtatttttattaatttccaattttgttaatgtaaaattatccctacttataatacaattatacatctttaaaagcattatctattattttagcagatttagctgcaaagaatgccgcccataaatcttcatctgcaatagtttcaccattaatattactatcattaattttagttaattcctttgcctctaatacatcatcatcaataacttcaatcttatcatcatccttcccctttaacttcaccttcaccttcttctaacccattctttgatctacgcaccttagctgcctgtatacgttttttcgtacttaaatatgcaatactttccttaattgtaccttcaataataaaattccaaacagttgtttccttagtttgtccaattctatgaattctattaatagcttgaagttcaaatgataaattaactataggttcacaaaggaaaacatgtgatgcatttgtgaatgttaaacctgcagcttgtgcaactgtatttaataaaaaacatgtaatagcagaattacttttaaattctttaattgattccccaagttttttattaacacttttcttacgtgttgtttctccagttccacttttttgatcagtccatgaatttaatctaattccttcacttctcatagctgtagctaataattgtaaaaatggattccattgtgaaaaaattaatatttgaactcctttctccttcttcattaaatattttacttgtctaataatcatatcaaccttagtaccataactttttcttaattttatattggaaatttgtctaatttcagaaatcggtaatccttgataaataaaattcatatctttttcaaaaattctcctattctgtaacagttttaaactctctaaatcattctgttcctcattatcatgttcattgttaacatcaccatcattctcgttattttctgtaatcaactcttctttaccatcatcaatagattcaatgacatcaccctttaatccacctctagaataagtgaaataatataattcatccttttttaaacttttttgacataatggacaagctaatttattcttcaaccattcatttaaacattcacgacaatatttatgtccacatggtgttaatgtaccaactaatattttaaacctacaaataacacaggtatcatcaccattctgaatttcaccatccctatttaatctaccatttaatgatcttaaatatttcattctagttgttaaggcaaccgttttctttaattctttatccattcttatttgaatttccgttatttcaaccatagctgcatatcttggagaattacctatactttcaggaacataattaactaaacaatcagatctattttgtaatgctcggaaatatgcaactttagcattaaatgcataatttaacatatcgaaaacttttatcttaatatcatgtaaatttttattcttttgtttctgttcacgtttcaataactttataatctcatgtatttgtttatgttgtatactttctggtaagaaagcttgtgattcttcaataagttcgagaattgcagtatgaaatgaataccttgcattaatagttccttctggcataaaatattttcttaatttttcaagtttagaattaaatgaatcatcagttttatttgttaaatttctactattcattgtaagttctgtacgatcagttttcattactttattagatccaaaatttaatgaaccttcagttaaatttaaacatctctccctatctgataatatcaaatgaagttgatcaatatatgcttgtgattgatcttgtaatattaaatgaatagtatattgtttaccatcattttgatcttcttgttcagcaacggggactgtttgtaaaaggtataattcattaaaccaattattaattatagtactttgatcatttaattgtttcatacattctttaactcgatccaatataaatgtaataccaaaagtagtcgaatgatgttcgaattcttttgtataatcatcaaaatattcagaaattaatggtaatttaacattagactttaccttcctatcattttcatcgttgtcaacttttgtcacatcaacatcattttcttcaccctgttcattaacttcaattacattatcctcaacatcatcctccttaacagttggaattgaatcaactgagtatttctcaaatcctttgaataatacttcaagtttactgattgaattctgtgacttcttaaaaggttcctctaataattggttcaaaatttgattagccttttcataatattcattttctaaataataatgtttcttctcttcatcagttaatgtttcaacatctataatttctatttcctcctcatcatcatcgtcaatcctcattttcatccttgataacagttccattcagcattttttttatcatctattattttctttaaatcattaaaattatcaggtaatggtttcattggtctataatgttgataatgagcagaagctaacataaaataagcttgatgtaaatattcaagtgcaaatctaattttatttgtaagaaatgtatcatcatctaaccaatttggtaattctttataataatctaatttttccttagctaatttaataatatcttcaaatattttaacaggattctgcaggatttcttaaaaattcttgaattttaccaagttgaatataatctttcatataattaacaaaacatgtagttaattcttgttcattacttgtcattaaatttttcaaaacatcatctaatgtaccaattgtgaaaatatcatcattattttcattatttttatttttattcttaattttatttctagtaccatttaaatcatcaagatttactctacctctaagatgtgcagtatgtaacaatgcatgacaacaaaccattcttaatttcccactccaacttcgcatatataatttacttgaatcataatcatatccttcaccaacaggatcaccattttcatctaatccaacttgatttaaaaatctattaaataaatcttgataattatcattttcaattgtactaaatggtgatcttaacataattctagtttgctttggtaaactaacttgtttaccaaccatttcctttgtatgtcttaaacatttatttttaaataatctatcaaaaaaatatcttggtatattcatccattgttcattagtcattgaatcaattggatacattctctgagatttaagtaatgataataaatcatttaaatctttccttattaatgttccagatacacaccatgtatgaactcttgggataattgttgaaaattgtgaaactttagaaatagataatgaagctaattgtgcttcatctaatactaatctataaaattcaagtaacattaatggtgatgaataatcaattctctcagatccacttgatttacgttttggtcttttggttggtttgaaaattcctctatctaattccctacctaatactgtatatgatgttattacaatatcatgatctctcatttgataagcaacctcttgtggtgttaataattcatcttcaagttgcatatcaacaatacctctataattaaatatttttaaatcaggacatgtattatttagttcctcaatccattgatttataattgtagcagggacataaaattaaagttgtctttgattcttttatttgtctactcgaatcatatatatctgtcttaatttcgtctgatatattttttctaggattcaatctaataagtgaaattatttccaatgttttacccaatcccatttcctcacataggaaagcctttgctggtaatctattatactcaatcgactccaaatgtttcataacaaatggtgtcctgcatattgcaccattatattcattataccaataaagtgtaattggatcattatacggatgaattcttttccatccaggtgttaaattatcaagaatttcagaaattatttcatcatcaacatgatttttcgggaacttcaaagttgtcaggatcaactgaatatttaagcgttatctccttttctgtagtccccttcttcatcatcatcttgttcctccttcttaattgaatattgaggattttccttaactatcatttccacattttcatgacgtaacatccatttcaaactatcaacttggaaaggtaataatgtcttataaatccctttaatatctaaataaggagatttgggatcacaataatttttattcgtattatcagtaattaatgaataaaatgatgaaacagttggagggctcagcggagaattaccatttgattgataattagtaagtgcaggtatcattaataattgtataatttcattcatatgtttataagtatcctttaaatagatagggtatatgctttctcttaaatatatggcaaaacttaaagtaaatttacttttcaaagttttatttgatcgatttaatgataaatgtatattttgtattttgaaataatcgatatgtatacattcattatttttcggtttcgttttatgaagttgatatattgcatatattaaagtatgatattcttgtgtgaaatttaattcaaataatgtatttaatagtttattacgtgtttgcataacaatacttgattttttaggtactttaggaaataatctaacatcaagatccaatgaaatatcatctttatctttaaaatattcctctattgactcatattcattatcagttaatgatttaggtgatgttgattcaattattgaataatgattaatcaacggaattaagtttgtataatcaatttcattacttgttaaatccgggttttgtccaagtaattttataagtgcatctaaattcaaggaatcattattcagttcaaaactaagtgtcggtccaacagacataccctctctaacacggacagtgtctctatcgacaaaagaatagaagtttatatactaataaaagttgaagagccttagcaagaaaaagaattaattaccacattgggaagatatcggtttgcacaacacagcctcaaaagtcgacttgtacatcagctggttagtaatatacagtttaattaaaagtgatgtgaatatagcatgattatccacacatctttttcttcttgggataattgttattttcttttttacaagtgtagagactctgtagaacagtagtatattagacaatgttagaggtatgtttaaagaatataggtttttttgtaattatggattaaagatactaacataaaaattattaatatagaatattagacaattaattcgacacggtagacaagctgctgataatcatccaattgataaaccattggaaacacctaaagttacaaaaccagctcaagatatcaagaaacatttacattctgaagcagcaactatacatgaaaagaaaattaaacaatctgaaatttctgaacataaacgtagagaagtaactacatctgaagttgaagaaaaggaaaaagaagagagaaagagaaagagaggaggaagatgagaagagaaagaagaattatgatactaatattgaacatcatgcaaatgatttaaagccatttgcagaaaatattatattacaagaaaatttagctgaacaacatcgtagagaaattagtcgtaaatctattgaaaaatatcaaattggtaaaaaattaggtgaaggtgcattttcagttgtttatcaagcaattaatttaacaaataatgaaaaagttgcaattaaagttattaaaaaatatcaattagatgaaaagcaaagaaatagtgttttaaaggaagttaatataatgaaacaattaaatcatccaaatattgttaaattaattgaatttattgaaaatgataattattattatattgttcaagaagttgtaagtggaggtgaaatttttaatgaaattgttaaatatacttattttagtgaagatttatcaagacatgttataattcaagttgcagaagcattattatatatgcatgaatatgttggaattgttcatagagatttaaaacctgaaaatattttctttaaaccagttaaatttttcaaggatgatccaaagaatagatttaataaattacgtaaatctgataatccaaatacaaaacttgatgaaggtaaatttataatgaattatggtggtggaggtattggactgattaaagttggagattttggtttaagtaaacaaattttacttaatgatgaaaataattcacttaaaactccatgtggtacaattggttatacagcacctgaaattgtacgtgatatgaaatattcaaaagaagttgatatgtgggcattaggttgtgttttatatatattattatgtggattcccaccatttttcaatgattcaattgatgaattaactagatcagttgcaaggggtgaatttaaatttttatcaccatggtgggatgaaatttcaccaggagctaaaaattgtgtttcaaaattattaacagttaatccattacaacgttatactgttaaacaatttttacaagatccatggattttagaatttttaaataaatctgaaaatattcaagcaaaggaaaaatctaatgcaagtgaacagagtactagtattccaccacctacatcattgaataataataaaaatgttacaccggatagagttgaaaatggtgttaatcgtgtatcatcaggtatgccaggattaaatgaatctaatgcgaagaatggtataataagtgatagaccattaaatacatatcaatcagtttattcatcatcattattacatattgaaaaaatcaatgagatgagtttaagtgatagtaaaaatgatagtaatagtgatagtaataatgaagatgatgaagatagtgaagatgaagaatttaagaatttagttggagaatttggaactgaattatcaagatttgcaggtgtaaatgaaggtaataataatggagaagatttagcagttttggaacatttattagaacctggacctgcacaaacaacatatcgtgaagaaatgaatagtagaggagataatagaaatgataataataataattcaagtggacaaattaggaaaaagaagaaatataataaaaataatgaattatttacacctgaagttagagcaatgaaagatatgtatgatatatcaattgcagcacgtagaatgcatgaagaaggtgaatttaatgatgaattaggtggtgaaaaattagccaaaattaaaggtgaaatgaataatggaggatttgataatataattgaagaaggtgatgaaaatgaggaagatagtgaagtaggtaatgaaggtaataatgtcacatcattaagaaatgaagtacctgcatttcaattaaatatgaatgatgcatcaattttagctagaagacaaaagaagagaatagttgtgtgataagaagaggggaaggggattgtgtttactgtattagaattttaaatttttttagtatttagtataaataaaaataaatgataagtataatatattattaactataatttatacataacgattgataaaggataagaaatttgaaaaattagtaaaagaacaaataaatataaggaagggtatggaaatttttttctttatagatcttagattagaatgaacaatctaatgaatattttaattgacgatcatcagtgaaaaccccccaatgagattcaactgaagaacctgaagtttcaggtttccaagattcatcgaaagcttcgaaaacaaaagtattaacccccaacctctcattgcacaaataccttctttccaaaaagtttcagcattattaataccaggaacagaactaccaaaattagaaccatcagttggccaaccagtttcaccaacccaaaagtcgatatcagttgaacctttagtttcttgaacagttttcaaagcttgcataatatcatcaaagaatgaaaaagttgaattttgttgagtttgaccttgccaataagagaaagcattagcatataaaacatctgaaacttgaattgcaggattagcggtaccatcaactaatttattccaagaatcaacggtaccaacagggatatcaccataagaattaccatttttatcattaatatttgataataattgtttaatttctgaaattaaattagctaattcatcaccagttaaatcacctctataaagtgcttctgaaccaactaaaacagatgaaattgaagattttgataaatttggtaaaagagattgtaatgattgtttctctaattcgaatttatcagaaggagttggccaaacacccattgtaagttgaaaattttcagtttccaaagctggacctaaaatttctaatgtattacaatcagatactgaataagttttaacatgattagtataaggtgaaattgttttcaaatcttgaatataatcatcataagttttacaagaacctgaattatccttaacaccaaggttaaaacctaaaggagctatagcagaagcagaagttgcaagtgataaagcaatagcagtgattgaagaaagtgagagttgcattttgccaaaggaaggaaggaaggaagggaaagaaagaaagaaagaaagaaggatcaaagaagataaaagtaaaaataggaaaaaggtatataaggatatcatcatgatggaaatgaagaaatgaagaaaaacaaagtgaaaattgaaaacaaaacaaaggaaaacaaaggaaaggaaaacaaagagggaaaaaattagcaatttgtttctttttatagaagtatagaatattgtcggaatattcagtgtgtttttttttaaatttccgagattacgtaatgcacattacgtaatatctgctggttacgtaatagtgattatgtcatcattacattacgtaatcatttattgattacgtaatatttttaatttcatttaaatttgatctagttattacctctttgggaaggtgaaaaatttttttgtatctttatctctatatctttaattttattgtcatagggcaatgggttcaaaagacaaaaaagacttagaggagattgaaattcaattggatggggatactcctctctccaagaaagaattaagaagaattaaaaaaggtaaaattacacttgaagaaattcaaaagaagaaagcaaaaaaattagctaaagctgctgcatccggtgatgaacctaaggtaagtaatgaaagtggggaaagtagtgaatctaaggaaagtaaggaaatcaaagatgaaactactactacaaaaagatcagattatggtatttggatgggtaatttatcatttgatacaactagagatgaagtatcaaattttataacttcaaaatcaattcctaaaattgataaaaaggaaattgctagaattaatttaccaactagaggtactaaaaataaaggttttgcatatattgatttctttactgaggaaaatttaaattctgcacttaaattaactgaattagaattaaatggtaggaaagttttaattaaaaattcaaaatcttatgaaggtagacctgaaaaatcaattggtttaactaaaactttaagtcaaaatcctccttcaagaattttatttgttggtaatttatcattcgatacaacttctgatttacttaaagatcattttaaacattgtggtgaaattttaaaaattagaatggcaacttttgaagatactggtaaatgtaaaggttttgcatttatagattttaaagatttagatggtccaactaatgctttaaaggataaaagttgtaaaaaattaattaatagaccacttagattagaatttggtgaagatagatctcaaaggaaagttatacctaaaagatcatttgatgaaattaatgatgataataataattctactcctacggaatactaataatgtccaacctaatagaggtttccaagaaaaacaagataaatcatcatttaagagacaacaatttaataaacctgatcaaagaatgaattcaggtattgcattagcaaatgctcaaagacaaagtgctgcaattgttaaatcaactggtaaaaaagttacatttgattaaaaatatttaaatttatatactattatactatatatactaatcgtaccacattttaattaattcctcagaaactgctgacggcgttaatacacctaaatctgaaactaatgcagtaatatattgatgaggtgtaaaatcaatatttgcattctttaataatccaatatttaaatcacatgaaaattctaatttattacctggaacatcatccggtgataatgggaacattctaacaaatttatgcgattcacttacaacatataatggtttatttgcattttttgctaaaactccaatttgatatgatccaatatgattaataatacctccactttcactaacaccttcagctcccataaaaattttatcaactttatttataacaaatccaacttgtgaatcatgtataaaacaaactggaatacctaatttctttaatgcatttgccatatctttacctgttttctcaatttcttcttcattaccaatattattattactacttgatcttgcctctgtaacgaaaactctaaatctaacaaatttacttttacaatatgctaataatgataaaacaactcttgaatatgaatgaactaaaactgtatcatcatccttaattaaattaaatccaatttttgcaattaaatctctactctctttagctctttgaacaaataattgaccattttcaactaaatgtttacgacatgattcccaatctgaataaagatgtgtatttcttaaaacaaatctcataaataaatcacatcctgcacttaatgatacactattatgaacactcgtctttaattcatttgttgcatctgataataatctaattaattctgatgatgttgatggttgtttaacttttaataatgtaactaatgattcaatagctgcaactggcattgtaatatctgcatcctcttctaaaaatttaagatatgtttgtttaatatcaaattctgtcatctttgtatgtatgtatgtatatatatatatgttcttatggaaagaatcaaaatataaatagaaatgatgaaatgaaatttatttttattgaaaaattcttgaaaatcatgttgaccaaatttcagtcttatattataaggtctttttcctatttccttatacaacaatgtcacgattgtccaatatatcaattacgaaaattggaataatatttaaaagacaatttcatatttcaaataaatgttttaacaatagttatgaaactgaacttattttgaaaactccaattaaatcaattagaaatattggtataatagctcatattgatgcaggtaaaacaacaacaactgaaagattaatgtattattcaggattaactaaaagaattggtaatgttgatgaaggtgatacaattacagattatatgacacaagaaaaggatagaggtataacaattcaaagtgcagctgttacattaccttggtcaaatcataaaattaatgttattgatactcctggtcatgcagattttacatttgaagttattagatcattaagagttttagatggtgcagttacaatatttgattcagttgcaggtgttgaagctcaaactgaaaaagtttggaaacaagcaaaagatttaaatataccaataattgcatatattaataaaatggatcgtgaaggtgcaggttatggtagatgtgttaaagaaattgttggtagattgaaaactaaaccaattttaattaatataccttattttattgaaaataattttgataaaagtttaaaatttaatggtataattgatataattaaaatgaaaattttcatttgggatgatgaaaatgatattaatggtaaaaaaattaaaattattgatttatcaaatggattggataattgtaaaaattatgaaaaggaatttaatgaaatgttaaaatgtcgtgaatcaatgattgaatcattaggtgaattagatgataaaataattgaaaatttttttgaaactgaagattattgtaaagtttcaaatgatttattaaataaatcaattagagaattaactataaagggtaaaattacaccaattttatgtggttcaagttttaaaaatatgggagttcaaccattaatggatgcaattgttgattatttaccttcaccattagatatttcaccacctgaagtaattggtaattctaatattaattctaattcaaatagaaaaaagaaaggagtaagtaatattaataataataatacccctgttatttctgaaaatattaaaattccttcaataattgatccaaatttaggttgtattataaataataataaaacattaacaacaggtttagcatttaaagttataaatcatccaaatcgtggattaatgacatttgttcgtatttatagtggtaaattacaaccaaattcaacaattattaattcaagaactggtgaacaaattaaaattggtaaattattaattatgaatggtgaaaatcaattagatgcaaaatatttaagtagtggtaatattggtgttataactggaactgatgaaatttcaacaggtgatagtataattggtaattcaattgttaaaaatattaaaaatattagtcaaaaggaaagtaatttaaaattattaccaattaaaattccaccacctgttttttcagttgcaattgaaccaacaactattgcagataagaggaaattagataattgtttaaatatgatgattaaagaagatccatcattaaaattaacatttgatgaagagagtggacaaagtattttatcaggtatgggagaattacatttagaaattactaaggatagattaattaatgatatgaaagttaatgcagatattggtgatatttgtgttacttataaggaaactattttaaagaatattgataaatgtatattatttgaagatggtacaggtgaggaaactattaatgaatctaatggtgatgatgatcaatcaatttggaattaatttaacaatttattcatttgaagatggtaatatttatgatttattaaaagatttaaaagataatcaaggtaaaaattttaaagatgaatcattaaatataattgatttaaatactggtattatatttgataaagatagtaatccaacaaatattgaaaatgaattaaaacttgaatcatggacattaaatattagttatgaaaaattaattaattcaatgatatcaggaactgttggttcattacaaatgggtggtagattagctagattaccaattcaaaatgtattaatttatgttaataaatattatatacctgaaattaaggatttaacaaataataatttaagtaaattaattaaaattacaagagaatcaattaattttggattaaattcattaaatgataatgaatttactatattagaaccaattatgaaagttagaacatttgtacttgaaagtgatgttggtaatgtatcacaagatataatgagtgttagaaatggtagaattttaagtattgaaaatgaaaatgatagtaatgatgaaaatattgaagatgattatgattataagaaattaatggaagatatttatgtaccatttgatccaactatgaaatatgttcaagaaaatgataattctaatataatgataattaagagtgaagcaccattaagagagatgattggatatttaactaaattaagatcattaactaagggtagaggagtttatgatatggaattaaagggtatggagagagcaaatagtgatagagttaagatgattattgaaggatgatagatagtataattaattagttatataactacatgtatttacaaaatcaataaataaataaataaatagatttgggtatgtatgtattgattgattaatgaagaattatttaaaatttctttttcttttcatcaattgataattcacctgcaccagtattagcaattaataataaaccaccaacaatacttaaagtttggaaaaattcatatctaagataatctctacgagaatctttataagaataagaccaataatgatttgttaaacaattatgaattgttaataaaaggattaaaattgatgcaaagaatttaggttttataaccaataacaattgagaaacatgaaaggaatccaattaaaataagtaataaatttaagaatgtgaaatgtaaagtaattgtaaaagtaatgaataaaacaattaacataattctaccaataaggaggaaatattttttattataatcatttgattcaatcattggtaaaccagggcattgaaagagatcttttatcaataattaaagaatcagataatgctaataataaaccaccaataacactaatatttcttaaaaggaaaggagcatcaaagaataaaccatataataaaccttgtaataggacaattgaagataaagtaattgatgaaggaattggtaattttcttaaaataattaaagttgaaccagctaacataccaataatatttaaaataaggaaaattttaacaatccattcatataaatgacggaaagttgataaataataaacttgttctctccattgagacataattctaaaagaatcttcaataaaagttgcaacaattaagaatctaccaattgttggtataaaaggtttaagagaattaattaatgataaattatcaaagatattatcgaatttatcagtaaatgattcaaattttttaataattggatttgatgatggaatgaatgaattaataacatctaaagttgaagaggatctattaattgcttgagggtgatgatgattattattgttattattaaaattatgacctctataagacatttttcagttatttatctgtgattactatgttcaattgagtatgtaaatgtctctactgcaaaagaagatcatcatgaaagatcataaaatacagcgtgtctttaacatgtgtttcatgtttccaaattttcaaagacagcagtcgcgtctggtattggaaagtcttcattttattaataggagggcaaatacttgtacttcttctagcagagccttctcttcatttgatcttcacgttgatcttcatttttatacaccattctgcacgttgagtaatggcaactacatgttccttcttcattaccgaatcctcctcctcatcctccagttttacgacgtcgttctgcctctaaaactgcccaaaatttccatcctttaccttaccttcatcacaatcacaaaatgataataataataaaatagattccaatactaataaaccattaccacttaatacaaatattcatgtacttacacttgtatctcctgaatctcctgatgatatcttaaaattacttaatataccaatttatcctaatacaattaaaattggacgtcaaaatactccaaaaattaataataaaataactgatggatttttcgattcaagagttttaagtagaaatcatgctgaattatttattaaagataatcaattatttataaaagatttaaaatcttcaaatggtacttttataaataatattaaattagatccttatattgattataaattaaatttaaatgataaaattgatttaggtacaacattagagagtcaattagctcataaaaaaattacttgtattgttaaaaatttacaatttattactttattaaattataataatttagttaatgatttattaaataatgatgatttaattaataaaaggttaaatttatttaataatacatttgatgtattattatttagtgatataattaatccatcagatttatctgaatctttttcatttgatgatttaatagatgatgaaattaatgataagaaacctattaataataacaaaccagataaatattcttcaatatcaattaatgataatggtatcattaagaatttaatacttgcagttaataatgaatatttacaacaacaaagattacgtgaaatgtcaacatttttaaataattataataatgcaatatcatcaaaggagaataccaatattttcaaactttatgaaaagatattaaaatcaaagaatagtagtagtagtagtagtaataataataataataatagtaatcataatagtaacaataataatatcaaaatagaaagtttattagcaagtaaatctaaaattgaagatcaattacatgtttcacagaatgagataaatactttacgttcacatttatcaacagcacagagtcgagaattagaattaaaggagaaactttctgaatatgagattaatatgaatcaattgcgtaattcattagaattgttagagaaaagagtggaagaggataaggtaataattgagaatcaaaaaaaggataatgttgatgttaaaactgaaactgaaaacgttgttgattcggatgttaatatcaattctaataccgatacggtacctgaagatgaagatgaagatgaaaaacgcgatgatgtaagggtcaattcacagcaaaaggatgatataataataaatgtagctagatatggaggtattatagcattgacggtagctgttctatatatatccaatcctataagagatctatactgtcgtatataacaagctaatagaagatcccatccaatggaagagtacatcgttaaatcttggaaatcaaccgaaaaaggcgaggcgcagtgaaaaactttattgtcgaaggatttcttctttattgtaattattatactcttttctattgattcaattgctattttaataatagacggttagtttatgtgacaatggattcgtcaattggtattccttcttcggataaaaaaattattaaggctaaaagatcaattaatcgtcgtaaacataaaaattcaagacttggttgtactatttgtaaaaaaagacaaattaaatgtgatgaaacattaccaatttgtaataattgtaaacgtactggtaaaccttgttcatatatttttttagataatgatgaattacaaaaattaattcatgaaaaggagaaaaataagtttgccaatgatgatgataatgataataataataataataataataataataataataataataataatgatttattgaatactggattattgaaaaaatctaatgtttaatgataatgatgataaatcaatgagtgaggaagaggaaagataatgatgataatgatcttcttaatcccgttaagaatatcccatcaacttcaattacatctgattttataaatgaatatatgagaaacacaattcataatgataataagaataaaatatttaatgatcctaaaactccaaatttacctacattacctgatcaacctaatcatacaccaattatgattgaatttttcggtgctattgatgcaactaaaaaaatgattcaaaaatcatctaatgatatagtattgagtgatacaccattctatgataatgatgattcattatttaatgctgttaatgttaataaaaaattcgatataattaaagaattaccaattgatcctcattatactgttgataaattagcttatgcacttgattgtattaataataatgaattacctttatttttcaaaaaatatgggttttgcaaattagatcaatttattgaaacaacttataaaatgtaatcatcaatttagttattttatttagtactttaatgagaaaatcaattattttatttactactgatgttattaaaaatattttacttaaacaaacttcaattatgaaagatttattatcatatgatgaaagattatcaatttgtaaatcttgtgaagatatttcaattgaacaattatctcaattaactaatttaattaatgatatttatattcataaatatttagattcttctaaagcattacgtgaaattatgttaactggatttttaactttagcaagttcaacatcttatcattataattcaggttatagacaaagtataagtattgaacaaagtaatcaatgtattaaatatattagtacttttattgcaggtttattttcaattatgattaatgaaaataaacaaaatcctcattataaaattgaagttgttaaaggttttagtagatttatattattagaggaaaaatttattatattagaaaattataatattaatttatttgttgaaatttatactaatctaaaatcattagatttaattaaagaaattaaaaagaactggtaataataaaccagattggtcaaatatttatactaatttaattacatttttagaaaaacattcacaatttttaaatgttttcaaagaagatacattattaggttatgataaaggttatataattagaattattaatgaatggtatcaaattttcccacatgatttagttaattattctaaaattaaatatccttatagtaaagataatgaaattaagataattattcaactaacatttattacattaagacatattttacaatcaattataccaggtaatagaacattagttagaaattcatttactggtagtcaacaaatgccatatgatgatgtttcaaatcttttaaaatcttattattatttgaaaactgaaaattataaattatatgcaatttatttaattagaattattacatttcatcaaacaagatatgaacgtatgaaaagattattatcgaaaatttatatacctgaatttgttgatattaataatgattataatgttattgaacgatgtaaaagtttatttacattttggaaaaaaggtttaacatttattgaaaagcaaagagattcaatgttattaagatatgatacttatttaattgaagataattatgcaactttaaatatacttattgatgatgatgataataatagagatagagatagagatgaagcaaagattaaatatcgtactaatgcagaaattattaaagattttgaatcaaataataatggactttttttaaaagattatgattgtagatcaattgatattattaaacaaactgaagagaaaatagctaatgcaattaaagatgcaaaggggacgggtaaaaatgttttaaggtatagattattgcgacctacagaggatgaaggtacgggacttgttttccgtaattgttggaatattgagaattgtattagaagtggtcgttcagagcagtgataataattttgacaagatacatttgagaaaaagttatcaacactcataaacttttttttttgcactctggaaatcggtaattcccgccggttaaaaaaatatcagacggtttctattgatgctgctattgttaatcattataatatcatctatagatttaatctagaacttttttctattatccaatggataatcattcatccttacgtgaagaatggtgtaaagaataccaagaaaaattcacaatctcaagatagtattaaaaaaacttactcataaaagacgtaaacatacaaattcaagattaggttgtactaattgtaaaaaaagacaaattaaatgtgatgaaacattaccagtttgtaatacttgctttaaagaaaaatgaaccttgttcatatatgtttttatccgctgacaaattccaacatttaattaattctaaaaattcaagtgaacatagcagtaataatgatgaatcaattaattttgataattttgttgaatctacaacaaatgaagaggattatgagtacttttcattactgaagaataaagaaatggaagtatataacacgttaagacaagatgaacataaagttacatcatcagttgctttgaataatttgactgagactaataaacatgaatttattggtccatctttttcatcacgatattttgatcacttggttaaaaaacctttaattaatgctaatgcaatagatgctattccaacggcattatctacaactatacttaaaccacaacagaaaatgggcttatcttatcaattttcaaatactcaatcattacctgatcaaccatatgttagtttcatcgttcctaatgaaatgcatattgaaaatcaaatatttgcttcaatggttgatcaagatttagaaacttcaattgaaaatttacttggaattactcatactaatgatattaatgaacaaattagtccaaaatttgaaagaatttatgcaactagtaatgatgaaatatttgaatttgaaaaattacaaaaggaaattattttaaacaatgatgaaaattcaatgaaaaattccgaaattgaaagtcatcgtgataattacaattatgataatgattatgctgaaattaatagtcctttaatttctgatgtttcaggttcagattattatgaatcaagaccgggttcagtatctggttcaagttcagattcagaatcttatgtacagagaagaagaaatattgaaattaatcttccttcaccatttaaagtttacactccagcatttcaacctgaaacggatgattatgaaccattaccaagtgcaagaactattgataaaacttttaaaatattaccaacaatacctgaaagattaagttatatgtttgaaataattacatcacctcctgatcaaatatctgaagaacatattcaatatttccatgaaaaatataatataactgattttgatgaaatatattattcaaattataaaattttatgtcaatttctaattttatttagtaaattagttagaaaggcaactattttatatattattgatgttactaaaaatattctttataaacaaaagacaattttaagagattcacttaatgatgatagtagaattagaatttgtggagtttgtgaaaaaatttcagttattgaattatctgaattaacaaatttaattaataatgattatattaaaacatattcacgttcaacaaaggcaatgagagaaattattatgacaagttttgttacattggcaatttgtacttcatatcattataattcagggtataggcaaaatattagtgttgaacaaagtaatcaatgtattaaatttattggtacatttatttcaggtatgttttcaattgttataaatgaaaataaaattgaacctgaaaatcaagttaaaccaattattagattaagtaatgctttcttagatagagagaagttggttgtaattgataattttaatagtgatatagttaaagaggtttatcaaaaattatatcttttaaaattatttaagattgataaatttaatgataaaatttggtcaaatccttatacaaatttaatgttatttttagagaaacattcacaatttttaaaagtttataagaagagaagtttattaggatatgataaaggttatttaattagaatgattaatgaatggcttcaaatacatccacatgatcttgttaatttaacaaaatttaaacaatctaataggaatatttcacaggataaagaaattcaaataataatttatcttacatttatatgtgtaagatatattttacaagctatagttccagctattagaacattagttagaaattcatttacaagtagtactgatatgccatatgatttacataaaaatatacttaattgttataaaatgttgaagaatagagatcataaaatatatgcaatttatattattagaacattaacatttatgaaacttagatgtgaaggtactgaatcaatgttaagaagacttcatatacctgaatttttcaattctggatcaatgccaacatctgaaaaatgtagtagattattaaatgattggaaatatggtgatgcagttaatgaaattatgaaaaattcatttgatttaaagggagaatatttaactaaatcgaattatccaagattaaacacagatgaagtacaaattaaggaggaagagacagttaaaatcagatttcgttctaaatttcatttaattcatgattttgaaaaattaaataatggattattatcacaagattatgatcctagaatagagaaaattaaagaaattaatcttacactatctgataatggtaaatttcaattacttaaacctggagtatctgaagttagtgctgattcattaatgaattgttggaatattgaaaactttattaaaatgaacaaaggaatcgtatagaaagataccatgcagaaccctgattttaccaagactaaatctgctaattaacgttttagttcttttgtaataataaaattaagaaaacctattgtttgtttctctattgttctctgtaattagttaatttgcatctacgtttttaggttttagtatttagttttttgaaataacaaattgtacattcaacagttatatatccaataattactatacaaaggcctttactgtgtattctccctgtatgctctacgtaacatccattacaaagaagtgaatcagaagatggcttataataagagattaatgatcatcaacagtcaataacccgcgttgatgaagtcatgtatgctgacaaggctcagattggttttgtagggtttataacagtttcttcttcattgtatcacatggtatcgaaggttattatatcaggtaactattcagatcgttctttcgtatcaaagttaatctcgtatcataatggatacaaaagcatctaataataagagagatactgaagatgagaaaactaaaccaaagaaggcaagtcataaaagacgtaaacatacaaattcaagattaggttgtgctaattgtaagaaaagacaaattaaatgtgatgaaacattaccagtttgtggaaactgttcaaggaggaatgaaccatgttcttatatgtttttatctgctgatgatttccaacaaatcattaatttgaaaaatttgaaaaatttgaaaaataatgatgatgatagtaaagttaaaagaaagagtgataattctcatcgtatggcaaaacttgataatatggtctctgctggattaaataaattagcaatgtataatttattagttcaaaatgaaggcagagaaaattttcattttgaaaataaagacaaagttgataaaattaaaataaatgatcgaataggaccaacattggctaatgaatattttgatactctcctcaaagataaaagtaataaaattgaagataataaattaaataattctaattcaggtatggagattgaattggaaaataacttattcaagaatcaacctttccaatctattgttgatgaatatatggtacatgaacctttacttaatcaatttctaaactcaattaatgaatatttaagtaatgacgaagaagaggaaagaaaaagatgatgatgatgatgatgatgatgattctggaatatatcagattgaaaaattaaggaataaattaaaattaaagaatgattattcaattaaatacccagggattttattctgaaaaggctaaagataagaatgatctaaataatgatacatcaaatgaaacatctactgataaccaaaaaaattcacaatatgaatcaatgggtttaaatcttggagtaaattctacatctgatactggcttctgatactagttctgatatttctcacatctcagattctgatccatcaatcaaaaccaatggcttttggtaataatgttccatctccatttaaagttgatacccctctatttcaacctgagatgaacaattatgagccacttccaggagctacattgactaataaaagtttcaagattttaccaaatataccgaaaacattaaattatttaattgaacaaatatcatcaccagtagagaaagtatcaaaggagaatattcaaatacttcgtcaaaaagtatggaattgttgattttaatgaattgtatcattcaagttataaaatatatttccaatttcttattcttttcagtaaattaattagaaaatcaatttttttatatgttgttgatgttttgaagaacattcttttcaaacaaaagtctatcttgaaagattcattgacagatgaaaatagaattagaatttgtggtgtttgtgagaaaatatcagttatgaaactttctgaacttaccaagttaatcaataatgattacatacaaacttattctcaatgtacaaaggctaaaaaagaaattatgttaacaggtttcattactttaggattatgtacagcatatcattataattcagggtacaggcaaaatattagtgtggaacaaagtaatcaatgtattaaatttattggtactttcacatcaggtatgttttcaattatgattgatgaaaataaaatgcaaggtaataaacaatttcaagcaataataaggtatagtaaggctgttttattgagagaaaaaatggttattgttaaatgtatcaataataagatagtaaatgaaatttattatcaattatattctttaaaattatttaaaattgacaaatataatgaaaaactttgggcaagtccttatatgaatttaatgttattcttagagaaacattatcaatttttatcagtttataaggaaagatcattgttaggttttgataaaggatatttaattagaatgatgaatgaatggtttcaaatatatccatatgatttagttaatataactaaattaaagcaaaagggtaagagagttacacgtgatatagagattcaaatgattatttatttaacatatatttgtatgaggtatgtattacaagctacagttccagctataagaacattacttagaagttcatttatagctagttcagatatgccatatgattcacttgaaaatttattagattgttataaaatattgaaaaatagagattataaacattatgcaatttacattatcagaattataactttcttgaagataagatcgaaaaaacttgaaagtatgttgatgaaactttatattcctgaattttcaagtactgaaaaattaaataattctgaaagatgtgaaagattattaaataattggaaatataatgatataattttagaagatatgaaggatttatttagtttgaaagaagattatatatctaagtctaattatccaaaattgaatacaagatcaggtgaaatagatgttgttaatgataataaagatggtaaagttacaaataaaattaaactacgtactaaagctgaaattattaatgattttgaaacaaataacaatggattactttcattagattttgatcctagaaatgaagaatcgagagatgaatcagttataaattcttctactaatgaacatgattttaatattaatgctatattaatgaattgttggaatattgaaaattttataaagttaaataaggagtagttctttatagattgtatttaaatcattcggtatagaatcaaaagttttcttttctacttttaaattgtaattaggttcttcactattattattattgatcatataattattcattcttgtttcaacaactttagataacaaatttgcagcttcttcaatatttattgaaacgttattacctaattcattataaacacttgtctgtttataaccttctaaaccacacattataagattaggattatttaaatatcgaagttcaggattaatattaatacttaaaccatgagatgtaacatttcttttcaaatttaatccaatacttgaaattttcctttcactactattatcaacaatccaaacacctgtattattagtagttgaaacattaggtactttcatttctttaatagttaataaactacattgttcaataaaattaacaaaacatcttgaagttaatctttcccataattttaaatcccaaataaaataaccaactaattgacctggtccatgatatgtaacttgaccacctctatcagttttaatatattttacgtttgaagtacctaaaacattaccattttgatcaattggaatattagttgccttactgaattgattttctcttttaccacctgtataaattgaattaaattcaaatgttaaaattgttggataaatattattaattaatcttgaatttttattaattattttataatttaaatgtttttcaattataaaattttgtaaatttgatgcatcttcataattagttaatcctttaaaatgtaaatgtttgatatttgtagctaattttaaatgatttaaatttggagggaatctaactgaacatgatgattcattaagattcggtagtttaattgaaaacaatcgtttttgaatttgaatatatgacatattcaagggtatttacagagttgtttaataactatttacagagttggttatattaaataatataaaataatgtatcaatgtttaaacagtataaatctattgaaatggcatgtacgcgttaaattatcaacaaattgaaagatgatcttctattataagacatgtatcttcttcttttaataactggcttcacgtgatagatgaagatatgcgtgttttatgtgtagcagagaaaaatgccatatctaagagtgttgctggatcattgtcaagaggatcgtttcaaactagagattctaagaataaatacgtgaagaattattcatttaaattcactttcccacaatggggggaatgtgatgtagtaatgacagcagttgcaggtcatttaactaataaacaagcacctcaaggttatggatggggtgaatgtcttccagaacaattatttacttgtcctctttatgatgtaattagttctgatgataataagaaaatttctgaaaatattattaatttagctaaaaattctgataaattaatgatatggacagattgtgatcgtgaaggtgaatatattggatgggaaatattatcagaggctagaaagggtaattcttcatttgatttaaatacaactttaagagctaaattttcacatcttgaatcaagtcatatttatcatgcagcttgtaatcctattaaattagataaacgttcaattgatgcagtcaatacaagacttgaagtagattttagaacaggttattgctttactagatatttaactgatcttatgaagaataaattgaaaagtaaagaaaatgataggttattggtaagttatggtaattgtcaattcccaacattaggatttgtagttgatagatttaaaaggataaaatattttaaaactgaagaattttggtatatttccattactttaaagaaaggtataacatttacttgggatagaggacgattatttgatagattattaactatttgtatttatcaagattgtatcattaatggaggtgataaatttatagttaaagatgttaaaaataatataactcatcattatgcaccattaccattaacaactgttgatttacaaaaagattgttcaagatttttcagatatggtgcaaaggaaactttagatattgctgaaaaattatatacaagtggtttaatttcttatccacgtactgaaactgatagtttccctaattcaatggattttaaaaaatatattgaaattcaaaaacaatcaaatgattggggtgaatatgctcatttattattaaatccttcaaataatagatttcgaattcctagaaagggtaagaataatgatgaagcacatccaccaattcatccagtttcatttcctaaaaatgaattaagaggtaaagaaaagcaaatttatgaatatattgttcgaaggtatttagcttgttgttcaacagatgcagttggttcaaaatctacaattcaaattcaatggggtaaagaatttttttcaacttcaggattagttgttcttgaacaaaattttttagaaatttatacatattcaaaatgggaaagttccaataaggaattaccaaatattagaattggtgaacatgttaaattttcaaatgctaaaattatatctggtaaaacatcaccacctcaaccattaacagaaactgaattaattgcattaatggatgttaatggtattggtacagatgcaacaattgcagaacatattgaaaaaattataaatagaggttatattactaaaattaagaaaggttcaggtaaatcatcacaatttgttttacaaccaacaatattaggttatggattagctgatggatttggtaaattaggatttgaagatatttcattaactaaacctttcttaagaattgatatggaaaataatttaaaatgtatattaaatggatcaaaggataagaaaactgttatacaagaaattttgaaaatttatgaagattcttatcatataactagatctaaatcatcaattatagttagagcatatgaggatgcattaaggcatacacaagaagcataatttataaatatatatacttaacataattcaatcggtggtggtatatcaggaacgttacctaattggaaactatcagctttaaaaatttcaattattttatctccaatatcagataattttgtcattggtatttcagttccacattgtttaaattgtacttgttgatttgatgttgaaaattgtgtattattgtttatattattattgttaatattagtattatttccaaaaggattagtgttattttgattattacttccaaatgcattacttccaaatgtatttgtagtagatgtattagtagaaccgaatgggttggtgggttgtgatgatccaaatgggttagcagggttgtgatgatccaaatggtgatgtattggtattattagtcgatacaccaaatggtgatgaattagctgtagcggatgcaccaaatggtgatggattagcattatttgatacaccgaatggggattgtgttgtagcaccaaatgaggaggtattattagtatttgtatttccaaaagatgatgtatttgaagtttgttgatttccaaaacctgaacttccaaatcctgaattaccaaatggtgatgatgtattactgccactaccaaatgatgtggtacttgttgtagtgttattattattatttccaaaagaattacttccaaaacctgatgaaccgaatgaagtattaccaaaccctgttgaaccaaatgaagatccattattaccaaatggtgtcgtagttgtatttatatttgtatttgtatttaaatttgtatttgttgaagatccaccaaatggattacttattgtagaacttgatccaaaaggattactaattcctccattacttgatccaaatggtgatttaccaaatggtgatgtattattattattattaccaaatggattagatatattattagaattagacccccatgaattattattatttgatccaaatgtaccacttgatctattgaatgcattaccaccaccgaaaggattttgaatttgtgattgaccggggtgataaaatcgacaactatcaccgtaattacatctaccttgtttaaaatatttacatactggtgttcttgatgacatgtttgttcaataaaagaaaaaatgaaaagaataagaaatgcatttcattctcaaaatttatttcattattacttcaatttattttcttgatagacaaacatgtatatttgtacaatatgtcattcatctgttatagcacttcataatgcagaggaattaaataatccacaagatttacatattagattagctagatgtccaaattgtgattcagttgcagatccatatgttgaatttgataatgttgttcttttccttgatttaatattaattaaaccaccagcttatagacatattgtttataatgtattattaccacaacaatttaatttccaattatttagattatttatattaatgacattatttgaagtttacgtttcttgggcataccaggagaaaagttattttgaacaatcatcacatacttcaatgataatttcattagtgcttaatagtccaattcaatatatttatttccttgcaactattttattacaaaatttaataatttgtatttcattaactggtttatcaattaattggcttaaatttaaatcatttaccaattaattcaattaatgatttatttattgttttattatcaactttattaatttcaaatataattaaattattcccaatagttatgttaatttggccttatgatttacctattttacatgttacaagattattagttagtatagttcatttattcttattagttgaagcaattcatattgttttatcaaatccaaagaataacaattcatcaattgattattataaaattattgcaattgttatatcaagtgaaattttaagaaatatattaacaaaattaattacaggatttacagcttcattgatttggcccgtttcaatgtacgatttaattaatgatgattgggaaatgtttaaatttaaattaaatacgttatatgaattggttaattatatgttagatgatacagttattaattaaatagttatattatatgtctatatttgattaaagttaactttcttacgtacaataccatcattagtccatactaagatccatgtatcgtttttattattattattattatcattattatcattattatcatcattgtgacatttctcaattccaatccatggtccctctaattcatcaaccattggaggatattcataactcatattaacttctctacgttcatctattgtggaaattccagttgttgatgtttttgggtgggtattattattattattattattattattattattattattattattattaaggatattatcattccatatattatcaacagtattattattatcatttctagaaatagaagatgaaaatcctccttcatcactataatgttttaattcatcaatttgaattgctcttaatgcaatgaaaatactcaaaggttttaatttttcttcaaaataatataataccattaatgtaattaatggtaatggagataatgaaagtgctaaaatccatgatttttctaaaattaatgaaccaactgatgttaattgaaataataataaacctaaaataattcttctaaaaataattggcataactttaccagttgaatgttgtggatgaatatatgtataaattaataaatatttataaatataataaccaataataaaataaattaaacctgcacttaaaattttagttgaaataactgaataaattaatgttataattaatgttaataaaggaattggtaattgtaaaccaaaattaaattttggtggttcatataatgaaataatttctcttgtagttaatttaccaattaaaaaatttttaattgaaaaataaataaattgtaatattttaccccaaggtaataatttaaatggcattaaaccaataccttgaagtaatattgtatcaatataaaatgatgataaacctcttaatgattgagctaattgaagtgctaatttttttgaatctgataaatacccccaataatttgaagcagtaccagccattgtgaaaacaaggaataaattaacgaaaacgtaaaagaaatttttcgaaactattgataattccatttcaccatatgaaataaaaccttgctttgatgataaccaaacatataggaaaggtattaaaccatttaataatgtatataaataaactggtaataaatcaataacaaattttgaaatccattcatgatttaataaaaaattagctaaatctggccaaaattttttaattgatttataattaagtaaagttgcaagataccccacggggaaaatgaaaataacacctaaaatacctgttataactgtaatataataaattttcaattttcttgaatgatttgataaagttgcattttcccaaataacatcatttggagcaggtgcaatattagtaattaaataaccaattcttggatcaataactgcttgacctaaagtttgagcagttgcaactgaatccattgttataaaagccgttggagttgcagaataatgttgtttccttgcattttgaatttcttcatcaattattgataattgattagtataataatctaatgcatcaattttattaccaaataaacctaaaaatccagttttaatttttggtcttaatttaattgaagcagttgatataagacttgttgtactttcctctggattattatagaatgaattatttgtattttctatatccaattgtgtaatattattattattatcagttaatgaaactgaactatcaaaattcattgaaacagtatcttcttctaatgtattaattttcatataatttgaccaataaaattccaattttttaataattttaaatctaacttttaataaagaatttaaatttttccattctttacaaataattattttttcaactttaccaatatttaaattttcaattatttcctttaaatttttttcagatctaaattgtggaggtataccagataatctaattgttctatcagttattgaattttgtttacctaaaatttcttgtctttttctaataattttttcagattgattaagaagaaatttacaagttatgtaagtaaatatgtaagtgaataaggcataagttgcaagatatccattaaatgatgaaggttctgagtcatcaaatagtgatacagtatcattatcatcataattaccagtataatgaaatctaattggagatatgattgtaacagcaaataaccaacaagataataataatttaattgacattttgaaaaatccaaggaaaacataagcatctaaagccagccaaattaattatatcatcctctgatattgaatgtaatgtcctaagtgaataccagaatgatttatttgaaatatctagcttattagatgatttattaattttattaatataatttaatctagccatgaaaatatgactatatttgccacgtaaaagagagaataagaaaatagcggacaatcccaagagggaggatatccccagttgggcagacaccatcctagaagacggtggagtccttatattatccgtgttcattgcatggtttaagaagaaagacgggtggcaaaagaggaaataaagaagagaagagaagtgatgagccttaagatgttatgaattcgcgaaattaatttattatagtatattaataaagacttttaatattggaagtgttgtttattatataactatctcttttatttagacatagacaatggcaaaacctttattcccacaggcattatcatctactttctctcatagattgactaatgctcattctccattgtatgataatttagcgagtgccagaacttctaaacgacagacaacttcaagagttaattatgctgaagattatggtgatttagatttagaaattgataattatgatgataataaaggtaatgaagaaacggtttctaatgattttatatcaaatgatgatatatcccaatttgtttcaaaggatgttacatatgatgatgaattaaatgattttgttaatgacgaagtaataataagatttagcatttgatgatgatatagatgatgttgaagatgatgaagaggatgaaaaggatgaaacttatgaagatcccgatgctgcatatgatatttatcgtaatttaattttaaattcatcaaattcatcaaatacaaattctaaaattaatttatcaaattttcaaggtaataaagaagctccaactacattaccatcaatttatttcactggtgaacaaattaaaaatccttcatcatcatgtttcaaggaaatgaatataataccaattaaaataaagataaatactaatggtgcaattataaatgataattttcttttcaatattaatgaaaaattaataacacctgaattaattgcatcaattttcgttcaagatttagatcttaataaaaatattgaaacttttataattactcaaattaaagatcaaattcaatcttataatgaattatttaataattcaaataattcaattattgatcaatttttaattaatgaaaaggaatttcatacagttttagatatttcaactaatattggtgaagattttttcactgatcgtatagaatgggatttattagatcctacattatcacctgaatcttttgcattaacaattgttgaagatattggtttaaaaccagaatttcaaacttatattgcatgtgcaatttatgaagaaatttataaagtaaggagagaaatgttagaaaatcctcaacaattaactcaaacaattgattcattaccttattttaatttaattaacccagatgatttaaatattgggattgttcaaggtattagatatgatattaaaaaatatggtgaagaatttattccaagttttgaaaaacttaatgaatgggaaattgaaaagagagaaactgaaaaggagagaaatttacgtagaaggaaacgtgaaactttacgtgttgcaggtgggttatctcgttagatgggtggatgtctgtatgtatactttataatcataatcattgatacttcattaatcaattccagactcaacgcgttgtataataatttttcaattttaatatcgtgttattaacatgaatcttccatttctttatttcatctcttatttcattctttatttctttccttatttctattatacaatatggattatacatctatacctgataataataacaaacataccccattgattcgttcaatcacacattcacgtgttaattggtttaaaattggttgtttaataactttcctttggttatcaattaattggttaattaattcaatctctaaaccttcatctaatacatcacctaacacatcattaagttcaagattagctcaacatttccaatatgatgaattttctccaatacctaaaaatattttccaaacttggaaagttccaagaagtgatagaaatttcccaattgaatatatgaaaacttgtgattcttgggatgaaaaaaataaagattacagacatgtaattataagtgataatataattgatgattgggttaattctgaattctcaattatacctgaaattataacagtttggaataaattaccaaaatttattttaaaggcagattttttccgttatttagttatatttgcaagaggtggtatttattctgatatggatacttattgtcttaaatcaattgattcttggaataaaattgctaattttgataaattaaaaacaggtttaattattggtattgaagctgatcctgatagacctgattggtctgattggtatgctcgtcgtatacaatttgctcaatggactttaatgggtaaaaagggtcatccattcttaagagaattaattgttagaattattaatgaaactttaagaaaagatcaaagaggttatttaaataaaattgaaggtaaagattcaggtggtgatataatgtcatggactggaccaggtattttcactgatactttatttgattatttaaataataaagataatttagaaactcaatatggatttggtattggtagtaattattggttaaaaaatgaaaaatttaaactacgtaaacctgatattgatgaaaatggtttaccattacatattaatgaaatggaaattaattataaatcatttacaaatttagataaacctaaaattttcaatgatatcgttattttaccaattacttcatttagtccaggtgttggtgcaatgggtagtaaaagtgcaagggatgaaatggcatttgttatgcatacttttagtggtaattggaaacctgaaaatgaaagaatgatttaattcataaattataccatatatattataccatcaatagcattatatagattatcttattcataaatatcatataccatatacctacctagcatgtagtgagaaagagtatattttttttccataggtttggatacttttcttttaaataactatgggtataccgtatataataccattatctgcaacatcaagatttttagcaactcaactatcaactgagaattgtataccacatattatattaccaaagaataatttaaaatatttccttaaaaatggttcatcaatatcttataataatcaaatttcttcatcaaattattttaaaaggactcataaattcccttcatcatcatttcaatatttacaaaataaatataaagtagattctaataataataataatcattccgtaaatccaatttcaatttttataccatcttcacaattaaataaattttcaatttctgatgataataatattttcataccaccaccaaattctgatattttcattataaatccatattttggtcaaattgaaaattatcaacagaaattatctaaatattatgataataaaattgattcaattcattctaaaagtaaacctagattttggtcattaatttcaaatcatttagttacaaatggtactttttgggatattaatcataaaggtataggtgaattgaaaattacttatataccatttaattatattgaagcatcatcaaatgaaattattaattcatcaaaaataattaaacaaatttttcaaactccaacacttttaccaataatttattcatattcaaatataaatttattattaattgaacaaatgataattcaatcatcaatttcattaattaatcatattgaatttttaccaatttatcaaaatttgaaaaataattcatctttatcatcagagaatgaaattgatatttatgttgataaaagaattaaattgaaaaaacttatttatgatttaattaatgaatcagttaaagttttaaaggaacatccaattgttaaacattatattaaattaactccaacttatttagcaactttatcagaggaaagattatttaatattgtattaaatttaatttattcagataaagttgtttcaatcaattagtaataatattaatccattaaatgaaattattaaaagaaaaaaatttgttaaattaaattcaaaagaaaatgaaaaattaaataaaaagaatgaatcattggttgataaatataataataataataataataataataaatcagaatatgataatataatacatttaagagattttgctaaatttaatagacatattagtaaacttggttcaacatttggaattaaaactccaaaaaataaacttgtttgtcgtttattagatactcaaaataaagtataattacatagataattaattatcatttttatagaaactgtaaatatagattaaattgcattacattacactaaatgtaattttgaaattaaaagaacgtctcaatacacacacatgtactgaattttatttatttatttattattattattattatttttattatcagaggattgattattcattatatcaccattaccactaaaaactgatctttgattaaaattattcatgtttaatcctccaatacctcctctgccattattatcattcttgttaatatttgaattaatattagaattcatctctccaaatcctttcatattcattaaattcatattaccaaatcgattcatatcattaattgtagaattattattattattattgttgttgttattcagatcactaaagtgattcatattgatattgttcaaattcatatccataccattaagtttattcaaattgtttatattgttcatactattcatattgttcatattgtacatattgtttaaagagttcataccattcatattcatattcatattattgttcatattgctcaaattgttcaaattggtcatgttattcatgttgctcatattatttatattggtcatattggtcataccattcatattgtacatattgttcatattattcatattattatagttactatttaaattgttcatattattaatattacccatattgtttaactcattcatcatgttcatattcatattaaaattattcatattgagattcatattattcatcgaatttaaatcaaaattagtattggataaatcactaagatttagtttatttaaattcatgttcatattagttatattattcataccatttaatatatcattattagaattagaatttgtattgttgaaattattaaattcattaaatggagtaaatgcattcatttgactatatccaaaattagctgaattactcattgattcaatatttaaagaatctgttgaatcgattgttggtgtaaccgattttgatacaatatcttcattattttttacattatttccaatatcaatagtttcaacttctttaccttcattattatctgaattttgcttcttgtcaatcttagtattagtattattcttattattcttgctaaatctttcagacttatttttataagatgatgcactcacatcatttgaatattccagattttgattatttggaacagtattaaaataattgttggtgataccattattaccaattttataatttgatgatttatcatcatctaaactaccatcatgcttactcttgttgcctttgttattattattattattattattattattattattattattattattattattattattattattattattattgctactttcgttattattgatatttctctttttattcttattatttgatttccgatcaatatctttattagtaatccctttatcatcaataattgagttaaccatatcagtatactgtgaatgtgaatgtgattcatcatcaaatttactgggtataccttgagatgtatgaggacgattattgttatttaaagtaggatgatgatatgtttttatttgaaaattttacatcaatatctgatgatgattgcgatttaatattcctgttattcaataattgtttatttttcttatatttagaaaatttaccaaaagattcagaaggttgtaaaccaaatgaactaaatgatgaaccagcataaactgttttatttgaagaattgtcatctatttgttcactattaaaactattggattttttctttaattgttgaactttagttttagttgattcctttgattgatccttagatgattgtcttgataaagagtctcttgatggtgtttctttattgagactatttttatttgaattagacaatgaatcttcagaggaagctttagttgatgccggtttaatctccagtgaaaaatcttttggtatgtcaaaatagccaaaaactgaagaatcttcctcaattgtacaatcaatccatttaatttcattggtattttctaaaactaaagatttacctaaaataatgattgcaattaatcttaataagttatcattcacctttgttgttgtacctaaagttttagattttaaagattcatttatattatcatttaaagttgtatttgagtcagataattcaccaattaatgcaagaactgattcaggatcttttttataaagatggagatcattaaaatcagataataagaaattgacaggtttgaactctcttagggcgacatcttccttatataatctttgacgtattggtttagttgtaataatatcttcaaatgatgcatctgggaataaagtttttataatttctttaacttcatcatttgataaatacttaactagtaaattaattaatttagctaataaatatgatacatttgtcgactttagatatactcttgcaatttctctctccttgaaccaacagaataataatcttacaacaggcaacagtgatgttgaaaatgacattaaaacttttggatcatcatttttattttggttgtaaactacattcaaattgatgttgagttggaatttgagttcgagtttgagtttgagtttgagtttgagtttgaaatagaactattattatcatcaatatcatcattaacatcattacttaattcatcattcaacttatttcttctcttttctaaagattttaaattttcattacttacattaacacaaattttcaaaaaagtttccaaatatctgaaaaggaaaatctaaataactttgaatattttcacttgattgagataatgaaaaatcaatatcaatatttctattaactattttattatcaattaataattcaaaacctccaattaaaataaccagttgtttaaaataaaaatcattgaagatttgtttgtgaaaatctaaggttgataataagtaataaaaatcattttcaattatatcaattggatgaccagagattagataaccatttttcaatctccatttgtcaggtaataaattataattcaataagattaagaattgagatttaagtaaacataatctatcatttttagtaattgttgatctttctaaagaatttaaatattcgaattttcttagaattgaattagttcttggatgtttacttaataaattaagtaaattagtatatgaaacagttaatggggatgaagttaatgaagctctaataaaattatagacgacattaaatttatcatcttttaaattatcaataatagcaatatgattataaggatcccctaatgaaggtaaaattagcaatgataatttgtataattcgattgattttgaataattattattatcctctttagaaattgaagttgaaggtagataagttttagcaactaaagttctatatcttgataaatcaccaataaataaaacacatttatgagtaatatagataagtgagaagactaaatgatttgatcttggtaattgaagtttatcatttgaatttttcaaatctaattttaaagttgaagctaattttttaactgggatataaattgataaatcataagtattcaagattgattttaagattgtaaaataaaaatcataagcctttgaaataaatttaacgaatttatcaaataattttttatattcaacaaatgaagaagaatattgtttttgtgagttgttattagcactgttattattactcgatattgatattgatgaatttaaagatctattctttaattttgaagatttattaagttgatgaaatgaagattggaaatatttaattgcaggatgatgaatttcaatccaaactctaccaactattttatcaactgaatttgaatttgaaggattaagatgtaaactttgatttgttgaagaagtattattattagataattcattaaaattattgccaaaagttaaaatatattcatttgataaagtatttaagatataagatgagaatttagaattacagaaagacagagtaccttgtaaaagggaagagtctgtagaagaggattgattagttaataattgtttaattgcggccttattggaagcaattgttgaatcaatgtcaaaatcaaaatcaaaatctgtatctatacctatatccttctgagcatcttgaatatgaccattcaagaccccatcatcaccgtcactcatgttgctagatgaataatccaaaagagaagttcttctagataatataaacaacaacagagcctccaattaattgaaattgaaatttcaggaaaaagaaaaaaagtggcaaatttgtaaaaattggaaaacggggcaacttctttctaatcgacgcatcgtcttcaagctttattctatttacatgattttttatcagtgtgaaaaattttcagtttatattataatagataatgataataagtgaagattaatcttctttttatttttatttttatttttatttttatttttatttcgtttattcctttatcaagtaatgacaactgttatccagagagtcttacattctcagaataagcatttgcttatatcttcaaattcattagtaaattcaattttcaattattcaattaaatcaaataaaaattattcaactgaatcatcaactacatcattaaataaagttattacatcaaatgttattgaagaaactaaccttcatccacttttgaaaaaagcttttattaaaaatattggtccaactttaacacctgttcaagaacaatgtattaatgaatttattaattcaaaaaatggtattgttgtacgtgctaaaactggtactggtaaaacttttgcatttggtatacctgttatgcattctgttttatcattaaaggatgaaaattttaaacatgctgataaatatgttaattctgttattttctctccaactcgtgatttagctttccaaactcgtaaatcattatctgaattatggtctgaatgtggtggtaaatcaaattcaaatttaaattctagaagagattcaagagattcaagaaatagaagaggttcaagggatagaagaggacaacaacaacaatctaatgataaatctgaatcaattcctttagttattggtcaaactccttatagatcaacaatgaattattttacaggtaatgaagttccaccaattgttgttgcaactcctggtagatttatggatatgttagaaaatgaaccaaaatttcgtaatacttttaaatatcttcaaaatattattattgatgaagctgatgaattattaaatggtaattttaaagaagatattaataaaattattgatgaattatcatcaattcgtgaaccaattccatcaattgaagattcatctaaaatttataaacctaaaacaatgttattctctgcaactgttaatgatgatgtatttaatttagctgaacgtgcaattagtaatgatttcccatttgttgatgttacaggtgctaaaactgatgaagttaatgaaaatattacacaatctttaattcaaactgattcaatctttgatacttatgttgcttcaattaaatttattttagataatattcgtgaaaaaaattttaaaccaattatctttttaagtacaacaacttcagttgattttatttcaaaattattaaatgatgttttacaagatcaaaatattcgtcgtcgtgttttatcatttcatggtaaattatctcaaggtaaacgtgattcatctcaaagaattttccgtgaaaatgataatacaattttagttgcttcaggtattggtgcaagaggtatggatttcccaaatgtttctcatgttattcaaattggtgtctcatctgaaattgattctcatactcataaaattggtcgtactggtcgtgcaggtaaaaagggtaatgcattacttttcacttgtaaattagaggaacctttcgttaaagctttaaagaaaaatggtaataaattctcagatattacccattttgatgcaaatgatgaaaattcaattgaagttgcaaatattattaaagatcaaactagatcttaccttgatttaaatgatacattctttgcatcattaactcattatcgtaatataccttcaaaagttgcaaaattagatttaaataatcttgcaattgatgttgcaaaatgttatcaagaattattaggtgaagaaaatgaaaatggagataatgatgatgatgaaattttacctcaaaaactttcaatgtcttatactgctgctaaacatttaggtttagattttagaactactgaagattattttgaatttacaggtagaagaccaaacaattcaaataataataattcaagaagtggaggttatagaaataacaatagaaactcaaagagaaatgattggtcaagaaatggtgatagaaataataataataattattattatagaagtggtaataacagaaatgataataattatagaggtggtaacagagaaagaggtgaccgttggtaatctgcttattttgctaatattgaacattacttgtacataaaataaaaattcaattaacttttttaaaattggttaattaaatgaaaaacataactttgtaattatagtacctaataggtgatttctgtgtattaaatgatcctgtctataagctatatataatatttttttattatatttattactattatactattaaatttggacattactacttagttagagaatttaaaataattttcttattatttaataaaccaataactaaatcaatattcttattattatcattagaattttttaaattgtttaaatttttcaatttatcatcaatttcattatttatctttgaacaaatcttctttaataaaacataaatcgtattatcataatattcaccatcactattacccatactaaatctctctaatttaggtggacatgtataacttgtttgattatcattatatttaaattcattttcattttcaattaatgcagatattgccattcttgtacgatatgatggtttaacaataattttatctttatttatatcttcaattccaattgtataatcatcataataacctgattgtttaagccaattaacaacacttttcttctttggattatttaataattttaaaataatatttgataaattaattgtattaaatttatttaaaattttaaattcttcttcttcattaataattttagaagttgaaaatccatattcacattgaaggaaatcatcattatgtggaccatatgtaaaccaaatattttcatccttctcaatttctttaattgtataaacttcatatccactctttgattgttttgcaatacaatttgaattttcagtttgatgattaataaaatctataaatggaaccattgtaatattacttgattgattatcctttttatttgttattggaagataattagataatttataatataaacatcttgtatttattgataaccatgcccatagatattcagtttcagttatttcaatattaaatgattttaataatgattttataatttcaatatctttcttaaattgatcaatttgtttatatgaatgttcaagcatctctttcggtatagatttataaatttcattatcaattttatcacttgataactcccatgtcattggaattccactatattcaaccatttgtgggaaactattaaacatttcattccaataagatttatcttttctctttttctctaatacaatatacatagttataatttgatgtgatgttaatttcatcaatgcttcaaaatctaaatttgagtaaatttgagtaatttcatcttcatcagtttgaaacatttcattattaaaattacttatatttttctttaagaaatcattaatatttaaattccaatatgataaatgttttaagataactaaataattcaataagaaaatttttggtattttaattatcatttcatcctttggtattttatcagtaacttgaatacaacgtccaaattcaatatcatcaattacttttaatttatccgatattaatgattttgttttcgttttatcattcttattaggtatcgtaagccatgatttaagcttctctgtattataatctttcatatattttgatctatcgactgtaatagatatagatataattaaagaaattatttataaaataaaagaagaatcgatttgatctgaatttttttttcattaacttttcctagtgaggaaatttaacatggctagtaaatctgcagattttcatgataagcattattaacatctctctttttcatcaatttatacacaaataacggctagaatatgttaatattgggtctcactggaggtattgcaacaggaaaatcatcagtttctaaaatattcgaagaaaaatataaattacctataattgatgcagataaaattgcaagagaggtagttgaaccaggtaataaagcttatgatcaaattattaaacattttaatccattgattgataatttagttaatgatgataaatctttaaatagaggtgcattgggatcatatgttttctctcatagggatgaattaaaggtacttaattcaatttcacatcctgcaattagaagaagaatactttatttaatttggaaagaatatattaatggaagttcagttgttatattagatataccattactttttgagagtggaatggattggttatgttcacgtgttttaactatttcatgtaattctcaaaatcaattggagagattattaaagagaaataaagaacttacagaggatgaagcaattaatcgaataaattctcaaatgaaaataattgataaagttaagaaaagtgattattttattgataatgattcatcatttgaagaattagaaaatagtgttgaaaaatttgttaagctaaatttacctgcaataaaggtaacgaataataataataattatagttatatgataaacagttggtggaattattttcaagctatattcccaccatttgcaattttaggtatatttaatgcaactattcgtaaatctatattgaaactaaagcttagattaacgaaaacatcattagaataatttcattatttataaatgttaaaatgattatatatattattaaactgtttattaaagagtgaagaagaaaaaaagctgataattaaattaacaattaaaaatagtgtattatatgatattgtatactagcatagtatagtactaattttttgttttacgtcgtaagatagtaacttcatgtaataaagcatctaacattgatttcatatcttctctctctaacataaacctttccttttcaattttccattgttcttcattaccattatttaattttgattgttctattaatatttgattctcttgttcaactgattctaatttatcaactaattcattatatgatgaacataatgataaatagttatttctcaaagatgaaaaacattttaaaagtttttgattttgaataaatgataatgaattagatgttatctccttagatacattattagaatatgtgttatttttagtttcctctagtatatcaattgtttcatgttttagtctcttgttattagtagtgttgttattattattggtgttagaaatagtatttctaatactactttggttgaccgttatatgattatttccattaaattgaggatcttctatactatctagtgaatcaaatgtacgtttattattattattattatgtgaaattagtgaattatcatcaacattattatattcattatgagtttcatcaagtaaattgttaagaggtaaatcaatctctcctgatatcattttattaatttcatcatctgctgtatgatttaatgggaatctttcattatgtggatctgtgaaaagttcattagaatcatgaattgagatatgattattattattattattgttgttgttgttgttgttgttgattctctatgtgttcagtcttaatgatattatggatattattgttgttattattattaataatattattagtagagtttataacattatttgatgataaactatcattttgaatataattttttgatattacataatttaatatagaatctgaaacttgatttaaatccgttcctttaacatttgatgaaatattattattattagtattgttattattattattagtgaaatttgtattttctaaatgtttaactatatcagaatcgatatttgaatcagttgtacaagaatctaatgaatcaattggagtatatgggaaacttgattcaggtgatgaatcataattttgtgttgtaccattactacttattgatctttcaattatctgtgaagttggtttattattattattattattatgagtagtattggtagttgattttgttttagtattattagtattaatattaatattagtattagtattagtattagtgaattgagctgcacttaaattcatttgcttttccagttctaaaaaattcaattctttattttctgatgcatttaatgaattatcaaaattatgtatatttgataaattattatcatttaggatattattaaaatccaatagatcttgcgatactagttgtgacattactaattggatataatttataattagttttttctataaaatgggtataataatattattattaataatagtaataatgataattatattatgtatctgattcttcagtttaaagtatagtcctataacccaataccttcaatatttacctttgaaattctttataaagtaaataaaatttaatttagcttttaacaattgaaaaaaaaaaaattttttactaagtaaagtattagtattagtgtaatattcgcactatgtgtaatttttatttttttacggtgtacggatattattttcttgaaaggattatgtaatcagttatgtgttatatgttacctttattaattatctctattttcataggtggtaattggttggatagtaagtaaccttggtgtatcactgttattgtctataactttaaattagtgatttataggctagaattggaagtaatcaatggttctttaaggcagcattaaagtcatcacaattcgattataatttaacttgaacatatgcaatttaattagtacaatttttttaatctaacttaacacttgttattgtgttgactttggaaagtttaaaaattgtaattattcttatgcttacgtaaacaacacaataacattctggctaaccacatagaatggaacaacaagattcgcccgtgtagcgtaatggttaacgcgtttgacttctaatcaaaagattctgggttcgactcccagcatgggtgcaggcgaaatcttcaattatttttttaatatttttctcattttttgtaaaagaaacaattaataagtctattttactttattataatatgaattcactctggaaacaatcactgaatggaaagataataattatatatgattctacatttagtatgaatttttttaaaactaatttttttttaattaaacttgtaaatagtataaattatacaaaatttagttaatttattttaatcttaaagtagtagtgacatttaccacagtattgtctgtttttcatatcagccatgaagatacctggaccacattttggacattcagtctttaatttagtaaccttaccttcaccatcaactttatagtagtttaagacagctaatttaacagacttatgtttgtgaggaatcttctttggagtagtataaaccttcttctttctcttcttaccaccacctcttaatcttaagactaaatgtaaggttgattccttttgaatgttataatcagataaagttctaccatcttctaattgtttacctgcaaagattaatctttgttgatcaggtggaataccttccttatcttggatcttttgtttgacattatcaatagtatcggatgattcgacttcaagagtgatagtcttaccagtaagagttttaacgaaaatttgcattttgggaccgtctgcaataaatgcttctttcttacctgtttaaaagaagaaaaatcaaagaagcatcaagtaaaattaactggtaaaaagctattgaaaaatccttatatgaatataaaacaaaaagaaaaaattttaaaagcgagggtaaaatgcgtccttaataaaaaaaagagggtttaaaaattaagagccctcatttaagtcatgtgataaaaaatattaaaaaaaaaaatttacattacgcactcataaaagagtgaacaaaaaaataatcttccgataccgggagtcgaacccgggtctgcccggtgaaagcggaccgtgatagccgttacactatatcggatagttgtataaaatcaagtgggtaataatttacactagcactatgctcattgtatattgcctgaataaaggaatctgtgttatatctcgctcttggtcccatgaggcctggtctataaagacaataccctactaaggaagaattagaatttgccacaaggcacgccgtcaggcagaattgatctacgttagcaatgaaaagctggagaagcataataaaagtaactagataaggatggctctaggtgacgcacagaaagctctccagggtcagtaccgatacataacagtcgacaatagtcgtatagaagaagcagcttttcatattcgaaaggattgtatattttaatgaaattaatgtaaaaaaaaagcgttttaagaagaagtttgctttaatcacgattgtaattgtactcaataaaaaactaaatagaccattttgttaaaatatttagttttaagtataatacaatcacttaaattaaaggattgcttgtcaaacaaagaagcaaaacattaataattgttggagttctaagcaaaatgtaaggaaagattttaaagcttatagaaattactattttgaggtttttctatttgtttaaattggtaaaaacgagataaactgaataatgttaaagaaaccacttaaattcaagtaatgatcaagaattacaaagtttgtttatgttacttctcataagtttttcttattagttttacatatatttattttagtttatttatattttatttaggttttttgaataacttttactgttgttataaaatgggcattacatttagattcagtggattacaacatctatatttgattacttttgttattatggccaaaaatatgaagagataaaacgttaaatgtcgttcaacaatttttggtttatcgttagtttacgaaacaaaattctttataaagtaaacaacatgataagattagtacaagatagaactgttaaaaatattaagtcctaatttagaaaactttaaagttttgaaaaataaaaaacacaaactaacaaaattaatttatcaaaaaaaaaggttgaaaaaaacatctccgagacggggaattgaaccccggtctcccgcgtgacaagcggaaattctagccactaaactatctcggaaataaaactgcgcaagccaggaatcgaaccaggggctcaacgatggcaacgttgaattttaccactaaaccacttgcgcttgttatggttttcttactaaaaatgaatttatagatagcactttatgcttacgtaatattaatgataaactagaccatcaactggattggaaaacatgctttggttggttgggtggaatcaccaatcaaaaccatgttgattataatgaattatttgaattacaaacaggaatgttgaattcccatttttatcacccttgccaatcctgcgaaggtgaaggtgtgactcatcctttttttttcaactgtaaaggaattgaaataattctggatgaaataaacatagatattgatctaaagaatattgttggttcaatgttatcaaaggaagaagcctacatggcaaatataataatcaagttaattatatttttcaacaaacaatgctacaaaagcaagaagaatgatccagagtttaggattaacaaaagatttatcacagatacttatctgttattcaaatatgaaaagttaagttcttattagatctaaattagatgaaaaagattgagaataatcaaacagaaataatttacatttagttcagtatatgaagatatattgaattgatgaagcatgaataatatatgcgtataagtaatcaatctgtataaaattgtaaaaagcgtcgggtggtattcaagctgattattctctttctagggaatgggtccttagtgatcctcccactattaaataattttttaataaatctagtacaattttttattattgctactgcttcttgaggtattaaaaatataatttactttctatggtgtgcctttcactctaaacctaatactacaggctctacactaaaagtgaaccaaaactgtatgttaaaatttattcacacaggaaatccgtactaatctggttacttcttttataaagtattttatataaaatacatacaagatgtaataaaatatatcttaagtgaaaaacttttcacttgaactttctcggcatttataaatgtctcattatatacacgaatgcacttcgcggaacctcattggccacttccttgcatcccaccagctcactaaaccgtcaggtctattcagtacctctgacctggaccactactttcaatactgtatgaatgtctctgcatgctgaataaaacacttagagtcattgatattacgtaatcacatccttagttggtatatgaactctacaatgcatgcatgttccttactttggtgtggcaactatacctatatttattcaaattgtccaaagacaaatgtacttcgaacccaacatatctaataaaaactaaaatacactgtaccattatcatattctattattagggtgatatactaatcttggttaattttttactaaaacaaacatctactaagttatgggaacctaggcgtgaaataaccactaactaaaaaccaaatcttgggtaaactatattaaggtgtgcttatcattatcattaattagcaacagtaagacatttcagaaacaaagctgagccacttttgaaatttgtgagttttttattcacatcttaatttaaattttgaattttaggttcctcatttttaacctttagctgatctctacatgattagtaccgtttttaacagaatagttaatagatttcaattctaatgataccttttcaaactacgcaaacattaagataaacccaatcgtagtttagcccccaaatgtaaacaaaagagtgaaaagtaaacaaaaaatagaattttaagaaaaagtaaacattgaaattcgagggtaaatgttaaatgtacaaaatgtaaataaaaaatcacaattttggctttttttcacaacttcacctggtattatctctacaatcaaaaggccttacgcttagcggaggtcatatttatcaatggatacaaaaaacttggaaattgattttttaaggggtcttatctatgtagtatcactaaggatattttaatgaaattattgtaaataattaatacgtttcagctaagatacaaaaaacaagagaatcagcgttatgaagaaaaaaagaaacgcaagtaaaacaaaaaaataaaaaaagaaacgacagtcaactttggaattctaaatgttatgacaacaacagttatcaaaagaacaaactatatattatataaaaataacttaaagtatataaaacatgttgtaatctaacgactctttgggcaggatccatattttacaacaacaacagtattaaaagaacaaactatataaactataaaataacttagattatacaaaatattaacagattcaatatcaaacctaggaattattcgttctacttatacttagaattccaatctttactatcgtttctttttctaatttgtaacgtttctttttttttgatttgtgagcaatacttaatcctaatcagttttcaaggctcaacttaataatacaatattattatgtattatttagtttcgcttagaattaccaatctcaacaaaacaaccacatcaaagtaatattagcaaacattggaatccttcgtagtacttatactaaggactccaacattatctaataatactgaaattggtctttcgaggctcaacttaattagaattaccaatctcagtaccctgtcatgctcataaatcaattacatctttgccaccccagccataccagccatttcattgaatttgaccgtatttaaactttttgtcaacatgccagcaatcatataattagtacggttaaatttaatttctcattgctttgaatttcatctctaatgaaatgatgtctagtatctatgtgctttgttctttgatgatgaactggaattttagacagcaatttacagccttcatcatcttcatatagtcgaagcagtatttccttttaaatctaaaccgaccaacaattgtctaatccatgatacttctttaactgcatctcccagtgtcatatattcagcttcagttgaagatagagcaacagtttgttgttccttacatttccatgtgataattgaattacctaacttaaaatgtaaccagccattgattttctatcaactctgtcaccaaccccagtccgcatcacaacgacttactaaatcaaaattattactttctttaaacaacaaacccaaccttgttgtacctttggtatatcttaaagtatgtttgcatgcaaccaaatgtttagttaaatcttgataaatatgaagcagccaatgctaaatctgttcttactgtattagcagcaaacaaaaactttcctaccatgctgcggaataatgtagcatcagattttgaaagtttcaaaccatcatcaactgaattaatgttctaaggaactggagtagacacatccttacactcagttataccaaaatcatgtaacatattatttaagtgtttatcaagatgtaggatagaccatttgaattttgtgaagttttcattcccaaaaatttatttaccaaaccaaaatccttcattttaaaacttgagtttaacagcattttggcttgattgatgagcgccatgttattagataaaaataataaatcatcgacatacaatgcaactaaaacaacttcatcattaaccattcttgaatattaaccaaattcagataatgaccgtttaaaacctgcagacagcattgcattattaattttcatattccagcacagaagagcctggttcaaaccataaagacctttacaaagacgatataccatatttgctggagcataaacgccatctagaattttcatataaatttccttttcaaggtccccattaagaaaagctgttgtgacatcgatttgatgtatcattcattgaagttttgcagctatagcaaacagaattctaatactttcatatctaactgccggactaaaagtttcaccataatccacaccttgaatttgcctaaatccttgagccactaaacaacctttaaacgttggtggagttgtattacccttgatattaaaaatccaacaacaaccaagtgtccttttgtgtgaaggtactcaacggtatcccatgtatgatttttctttgtgtacccttagttttttgtcaattgcaacttttcagaaattagcgtcaggtggttttatagcttgtttaaaagttgtaggaataaattctccagttgatggagttgaagcatttttaattactctgaaaatagcaccaagaaattttgcatctctttttgggggtgaaccccttagcatcggtaacagaggaaattgatctgacccactgagaagaagaacttccatcagtaaattgattgattaaagtaattcagcattacttgggagattatcagcaatttcagaataaattttatcaatgtaatcaagatcaactcaagcttgatcaaattttaaacgacgttgttatctccaataatgttaagtttattgatacactatttccatataagaagtttgcaaaattaccagatgaaggaataaaacatctataagctttatgaaatgtgcttaaaccaactagaatgccaaaaactgaaacaggagcaaatgcagaagtttttttctctggaggagctaagcataacaacaaacaccaacataacaagcagcaccaaagggataaataatatcacaattcatactatctttcaaacgtagatttactatttagattttcagcaggatatctattgaaaattcagcacttttaacagcctcagaccaaaaggtttcaggtaaaccagaagagaacaacaaagtacaaactttttcttctatatgttctttcaacaaccccattttgagaggagttataaagaacagtcatctgatggacagtaggcatacatggtgtactgaacattttcaaataaaaaaacccgccatttgattgatttcaggagtattgttaaattgatagcaaaactttctggaagatagccaaagattaaccagaagaagcacctttttttctagcatcaacagcagagtcagtcaaattagaaagttttttaacagatgtaagtgaatatcttcttctaataaacatcaataaatcaaaaccaacagcagctcctgttttgaatttatcaaggatagctggagcaacagtacaattcataattgattaaataatcaaagtcaaaagcttttgaatttgggcactttgaacatcggtggtatcagaagttaacatttcgataattaacagcagctaataactttggggagcttatctttagggagaagagcccaaattcatactaagaatttcaacgttgactagtattttcgtttctgatttgcgggcaagactaaaatttgattagtcttttgttgagatacaaatgtttcattgatgtgtttcatctatttatagaaaaaactaggccatatggtattacttatgattactaatgcctcatatgatgacaaatacaaacataaaacatttgattattaatcaaaacaccaattatcttagacatgattttgtctatataaagagaaatttccacttcttctttactgttctttagcttacttattatttttctttatgatgacttatatattattgtttctttttataaccttaaagtaactaactttacttttgtttatcttatttaaataatattaaaaattatatttcagcttacttagtaatatggattttacaaatatgttacctttatacaacaatgtaaataaacaatttgaacgtttgacaatatttgatgtaaatttgagggcaattcaaaatatactttgttctattgtcattaatgagccaactaacctttatcatttttccgggtaattttttaaaatacaatcaaataatataaacatttataaatgaaacttatcaaaaattggttcaactactattaaattcaacttttctaagagtatcaagacatattgaattaacaccaactatacataattcttttgagaaatcatgagtgtctggatctcacagaagattttttattttcttattcagacctaatcacttttttaaactttataaaacattgttgagatattaatctaaactaggattcgaacccgtgactataagaatcaaaacctttagaagaagaaaccctcaacaagaatttgaaaccctcaccataagaagagaaaccctcgtcaagaagttaaaaccctcaccttgaaaaatgaagtttttcaaagtgaaaatcttattatataaaggaacatgtttcccacttttataattttttatttcctcttattttctttatattatttattttacttttgtttatcttatttaaataacaatacaaactatattttaacttgcttattaaaatggattttgctaatagaattacccttatacaacaggttatgagttcattctctcacttgtgtccaaagtcatctattaatactttgaaatctgctgaaaattatcacaattgggatgttggtgttcgctccattttagctacttttgggtccggtttattggaattttttactgacggtgatttattagtctcaccggatactccggccgatgaccctagtgttgttcaattaacattttatcttaaccgggcccttcaagttgtccttattaataccgttgatggtaacattatttccaattatcaatgtgaaggcttgtctggttctgccttattagcagcaattagaagagattattctagattgtctgctcgtcaactttattcaatggttgacaaattaactaaatcatcctctatgccacttgacaaaggattattatttttaaagaccatgagatctcaatttactcatggcatgactattgatcacctgttaggtcttttatacctacaaatgtttcgtgatccttcggtcaattcaagaattttagatgctgctgatccccaaattagtttatcagctattgaagcatctcttaaggatattgctacctcctcatcttccaatggtgctccttctgctcaagcttttattgctaacaagcctaaatctagaaacagaaaatcaaagacttcaaaagatgttatttgcagaagatgtcaacaatctggtcatatttctccaaattgtactgctgctgttcctatttccactaagccaactaacaatattaataattctgaagtttctactaatgatgttgcttggcatgtttctcaaccaattgttcatgctggtgacacttatactcttgattctggtgctaatcttcatatgactaagaattttgaacattttagtgattatgtttctgctacttctgttgaaactgtttctggtatttctggtgataatttacaaattatgggtagaggcactgtcatttttaatggtaataatggccaaagaatttcaatcagtaatgttgcttatgttccaaatacttccagaaatttgatttccattgaagcaattactaggaaaactggttcaagaatttattttgatgaaggttattgttatatgcaagatggctcagttattggtaagtatttttcaaatactttgtatcaatttattttcttaccaattatctctgaaaattattgtttaattgcaaatactttgaacatgcattccagattgggtcacccatctggtagggttatgagggaattgggttatactccttcctctgatgttaaaatttgtgaacactgttctgctggtaaaatgactaaggttctaccaaaatcatctacttttaaagcaactcatcctcttcaattgattcattcagatgtttgtggtcctattaatgttcctggtttatctggtgaaagatattttttaacaattgttgatgatttttccagatggtgttcaattttacctttggcaaccaaatctgcagcttcttcagttattaaacaattcatcaacttttctgaaactcagttctcatccaaaggttttaaggttagtattattagaactgataatggtactgaattttgcaacaatgatttaaaacattatttacaagataaaggtattactcatcaacttactgttccatacaattcatctcaaaatggtgttgccaaaagaaaacatcgtactgttcaagagaaagcaagaactatcctttctgagtctggtttacaatttaatttttggtctgaagctgttaaaactgctgagtttattatcaatagatatccatctgatgttctcaatggtaaaactgcttacgaattatggatgggcagggttcctaattattcaatttttcattcttttggttgtaaatgcatggtattaattccaaaggaaaagagggaaaacattttttcaccggtctcagttgctggtatttttgttggatatagtccagcacataaagctcacagggtttttattcctaggattcaagatgttgttgtttcaaataatgtcaaatttgatgattcctattttccaatgttagactctaaaaacaatattcctattatggaggacgtttctccttctgatattttctatggtggtaatgctggtggtgttcctgttattccatctggtgcttctaattctgctgaacctcttattattaatcattcaccggttcaatccccagcaccatcttcaccagcaccttcctcctcatccacttcggatgctcattcaactacttcatcatcaccatcatctccagcttcatcatcatcatcatcatcatcatcatcatcatcatctgctccagtatctgcttcttcttcacctatgatgcaatcttctggggttgttccagataatactgaaatggttcctaactctcctagtgttcctgaaactgttgcctctgttccaatttctgatgctattgataatattatttcacaagaagataatgatgtctccaaattttttcctgatgaagacaaattagtttcatctggtgatgaagaagaaattgattctattcctaatgattttgcttatccagtttatgatgaagttcatcaagttcctattgaaccatctttacttccattacgtcgttacagaagtgataccacttcagcatctattactcaacctccactgcaaaagccatgtttcaaaccagaaacacttgcttcatcatctacatcatctactacaccatcatctaccacttcatcaccagcacttgctccagctcaaccatctgctattgttccaatgcaaaggtccttgtctcagctctctgatattgttgattcagttcctaagcgttccaaagcattatttttaggttccaatgccattcatactgctttttctgcatctactactgtttcatctgctttaccaactacttttactcaggctgttaattcacatgacagatccttttggttatctgctatccaaactgaattagatgctcatcaattgaatactacttggtctttggttcctcttcctgttggtcgtcgtgctattggttgtcgctgggttttcactattaaagattcaacatcaccacctacttacaaagctagattagttgctcaaggttttaggcaagtttatggtttagattattttgaaacattttccccagttgtcaggtatgaaagtattagaattgttcttgctatctcagctcaatttgacttaaagatccatcaaatggatgtttcaactgcatttttgaatggtactttgaatgaagaaatttatatgatggttcctgatggtgttgatgctccttctggtatggtttgcaagcttaacaagagtctttatggtttaaaacaagctcctttttgttggaatcaagctatcaatcaagttttattgtctgctgactttcaaaggtgttcaaatgaatatggtatttatactaaggtgttttctggctctattgttattgttgctctttatgttgatgatttattaatttgttcaaataatcctgctgccatttctgatgttaaaggtcttctctcttctcactataagatgaaagatcttggtgttgcttctaggtttcttggtatgaatttacatcaatctgaaggaagtgttggtttatctttaaatcactatctcaatgattatttggttgattttaatatgcaagattgcaatcctgtttctactccatttgctgctggtactgattttttgcctggtgatgctatttctgatgctgatgttacccgttttcgcagcatggtagggaagttattatttgctgctaacacttgtcgtcctgatttgtcctatgctgcttctacattatcaagattcattaaagatccaagagctaatcatattgctgctgctaaacatgtcttaaggtatattaaaggtactgtatcatttggtttggtttataagaaggtatctaattttcaattgattggttttagtgattcagattgggctggtgataagtttgatagaaaatcaattactgggtatgtatttatgatgtctggctgtgctattacttggaagtctaagaaacaacccactactgcattatcatctactgaagctgaatacatggcacttggtgatacagttaaagaactactttggttaattcaattgcttaaaactgttggtcttaaattcaattatccacctacaatttttgaagataatgaaggttgcaagttgcttacaagtcatcctgtccatcatcaaaggacaaagcatattgatatcaaacaccattttattagagagcatttaggtaacaaggttttcaatttggaatcggttagaacagatgaaatggctgctgatatgtttacaaagaatttgaatagaatgaagtttagaaaattcaactgtaagattggtatgactcctatttcacattttggttaagtttagattatggtagggtgttgagatattaatctaaactaggattcgaacccgtgactataagaatcaaaacctttagaagaagaaaccctcaacaagaatttgaaaccctcaccataagaagagaaaccctcgtcaagaagttaaaaccctcaccttgaaaaatgaagtttttcaaagtgaaaatcttattatataaaggaacatgtttcccacttttataattttttatttcctcttattttctttatattatttattttacttttgtttatcttatttaaataacaatacaaactatattttaacttgcttattaaaatggattttgctaatagaattacccttatacaacaatgaggggtgataatggtagtccttgtcgagttccattggatatatcgattttgggtcgatatatgaatttaccattgagaagttgggtgaaacctgctcgagattgaaacattattgctttaatgaacgttgatggaaaattgaatttcttaaggatggtggtgatgaagttgtggctaatggaatcaaatgcttttttgatatcaactcaactagtaagagagaagcgtgtgatggtggggcagcattgatatagtttgctatgatctttgctgtttgtatgtggaggtggatatcccggtttggtaagaaagcttgttgatgtggtgatattaatctgttgaaaatgttcattgatcttctggtcaatgtgtaattgtatagtctaaagatggtatttgttaaagagattggcctgaggttcccgggattgggttctttaggatcaaaattcttttttggtattagtttgatgattgagttaaagattgatgaatgagttaaagattgatgaatgagagttgacggtttgagatgcttggctggttgagaagtgtatttgattaacgaactgtatgatatgaagttttgaatatccccagctgtggaaccaggcagcatatgtgatgccgtctggtccgggtgatgaagggcctttttgatgtagtgctttgaggttgttaaagatttctgtttcttcaaatttggtattaagattttgtagttctgaatctaatagctgtggggctatgacgttggagaagatggagttgaaaagattttctgtatctgtgagggaggtaatggagttgttgttgaatagaaaaccaaaaagtttgtgtgacttttccattgtaagtttggaaaaagttgtttcatttaagaaatttttgaatcgtttgttaagttgttggtaggtgatacataatggattagagttgtgtggtgcttttaaattggagtatagattttctcgggttgattggtgctctgatggaagaagtctagagagtcttttgacttttgaaaggcggtgttgtatacatcagatgtagtggttcatgctgagaataaggttagcttcccatattggtgtacgctggaatatgaacttgattaaatctgggtctttggtaagtgttgagatattaatctaaactaggattcgaacccgtgactataagaatcaaaacctttagaagaagaaaccctcaacaagaatttgaaaccctcaccataagaagagaaaccctcatcaagaagttaaaaacctcaccataagaagagaaaccctcatcaagaagttaaaaacctcaccttgaaaaatgaagtttttcaaagtgaaaatcttactatataagggagcatgtattcccacttttattatttgtatttcctcttcttttctttatattatttattttacttttgtttatcttatttaaataacaatacaaactatattttaaattttttattaaaatggattttgctaatagaattacccttatacaacagtaagatgatgtgggaatggagaattcctatctgaatatagagatgttgggaatgaaggagagtgttgatctggtctgatggtaagcattatcgggtgatgggttgagtatggttgtttttggagtagtttgtatttgatggagtggtgatggagtaagttttcatggatgtaaaaacgatcaattcttctattttcgcctgtggaaaagttggtggggaggtattgaatttgtggtttggaggagtgttccaatctccaaggaagattggattgatgaggttgattgacttgatgttggtgttgaagtggtagtagaaatcttctttggttattgtggtgagattagaaaagatgctggtgtgtgataaagcggaatcatattcaagacagatatgtatttcagtatcatcatcaaaggtcagtttgagatcggttatgtatcgattgtgagggccttgaaatgatttttgtatgatggaagtatcaattatttgattatatattgtgtgattaacaaagatttgcgctctggattcttcaatggtatttactggtgtgaaatttatggagttgaattgaaaatgaaatctgatttgaaatttgttatgaagtaagaaaaagaacgatctatcatgatagatatatatattggtttttaccagggtaattaaatttgttccaggggtgagtgttcatcaaccagtgagaccttaaggcatttatcagatggttgttgaatatatttgttagcttcgggatccattgattcgtcctcagtttgatcgttcagcgattgtgaattataagcatcattttgagtatttagtgatggttgattataactagcattttgattgtcaaatgattgttcgttataattattgatttgagtgccgattggttgttggctatcgtgatcgatagtatttggagtgtttccaatgattttatctgctttgagatgttctaatgctgtttgaaaaattcttgaagggtatcagggaagaaattgttataaatttcaatccattgtggagtatattcagctattttagcgtttttgaaggcatcccccttacatattgttcaggaagtagactaagtccttgtttgatgatttcttgtgaagctgtaggacagctaattagtttatgttcttggtgacaatgaaagcattcttttcttctaattggacattgttttttgtggtgaccgagaaccttgcagtaagagcagaaacgtagggggggattgacggaggttgtgatgttatattgttcgtcatctagtgtgacttcacaagtggttggggggactgagtggtgttttaaatcaatgaggacatatgcggatttaattgtgggtgttttaaatgctatgtttattggcctttcaggtggtttggaaatgtggataatatttccaaagtttgagtaaagtcgttgtgctagaggttctgcaacagagtctctaacataagaaggatagctcatttttaaaatgactgcgttttccaatgtattttctggtggagaagagatgtaaattttgtctgatttttcagcgacttggtgaaatgtagaaatgagttttcggtataataagtcatcacatagtgctagtgttggtaggagtaagtagaggaaagtgaagttagtcttgatatcctcaaaacaagttttacaatctgattcaaatcagaaagatctttatttaattcatcaaaaatttggtttggaaaagtgttgattgatttttccgtgaggtttctggagttggatgtaatcttgaaagttgtgtcatactttaggacactagggtactctgttttgttagagagcatttcttcaaattctagagggttgttaaaacagattttgttgaatgcggagacgcggcgatttgtaggatgaaaattttttcggacgttttgttgttgtgttttgtatgtatgaactagttgggcgtaagttggattagctgcattaatgtggtttgtaggagcagtttgagagttgttaaaagagttaggaatagctgggtaagtgttattgtttgttagattgtttttgttttgtaaattgttagttgtaggatgagtagtaattgttttttgttgaggaggcaataaattggtctccttcacatatagtgcataatcagcccaatttggctcagaggaagatgtaatcgtaggtggaggcctgttggattgatccctggcttcagattccgttaattgtcgtgtgttcggcggcataaaagttggttgatttgattgcagcacctgagtttcgcatatatggcctcccactacactactcggtcaggttcttagcagcttaactacagttgttcggacgggaaacggtgctttctgctagatatgtttttttttttacattaatttcattaaaatatacaattttatacagattgattacttatacgcatatattattcatgcttcatcaaaattatgcaatcaaaagatccaagtacaaggcacgaccgtttactcacaatcaaaaaagcgggcttagctcagtgggagagcgccagactgaagatctggaggccatgtgttcgatccacatagctcgcattatttttcttaaaattatttttaaagtaaaatgcaaaagcccttattttttagcataaaataactttattttcacttttaagtctactaagaattaaaaaccaggaaaagcttcatcgctgaaaataccatttaaaaatgcagcagaaacatccgttttataaatttgcaacataagttgagctggccttacaagaacaattctgatattttccactccatagtctggccttgtaagtacgtggtgattttaagcctttaatagtaaatagtagcagtcatttttgaaaagcatctaattcaggtttgatagcagataccaaaaggatttgcccttctggcttggaacatcaaattatagtgctggctaagtaatagatgccataaaagtgtcacttttaaaacgaagttatgggagtgaagatggatcaatgggaacttttttcattcttaatctaaaaagcactaggattgcttttcaaggccatgataatactattcaatcatatggaaaaataagaagagttggcaaggtgatgtttgttgtataagggtaattctattagcaaaatccattttaataagcaagttaaaatatagtttgtattgttatttaaataagataaacaaaagtaaaataaataatataaagaaaataagaggaaataaaaaattataaaagtgggaaacatgttcctttatataataagattttcactttgaaaaacttcatttttcaaggtgagggttttaacttcttgacgagggtttctcttcttatggtgagggtttcaaattcttgttgagggtttcttcttctaaaggttttgattcttatagtcacgggttcgaatcctagtttagattaatatctcaacaccctaccataatctaaacttaaccaaaatgtgaaataggagtcataccaatcttacagttgaattttctaaacttcattctattcaaattctttgtaaacatatcagcagccatttcatctgttctaaccgattccaaattgaaaaccttgttacctaaatgctctctaataaaatggtgtttgatatcaatatgctttgtcctttgatgatggacaggatgacttgtaagcaacttgcaaccttcattatcttcaaaaattgtaggtggataattgaatttaagaccaacagttttaagcaattgaattaaccaaagtagttctttaactgtatcaccaagtgccatgtattcagcttcagtagatgataatgcagtagtgggttgtttcttagacttccaagtaatagcacagccagacatcataaatacatacccagtaattgattttctatcaaacttatcaccagcccaatctgaatcactaaaaccaatcaattgaaaattagataccttcttataaaccaaaccaaatgatacagtacctttaatataccttaagacatgtttagcagcagcaatatgattagctcttggatctttaatgaatcttgataatgtagaagcagcataggacaaatcaggacgacaagtgttagcagcaaataataacttccctaccatgctgcgaaaacgggtaacatcagcatcagaaatagcatcaccaggcaaaaaatcagtaccagcagcaaatggagtagaaacaggattgcaatcttgcatattaaaatcaaccaaataatcattgagatagtgatttaaagataaaccaacacttccttcagattgatgtaaattcataccaagaaacctagaagcaacaccaagatctttcatcttatagtgagaagagagaagacctttaacatcagaaatggcagcaggattatttgaacaaattaataaatcatcaacataaagagcaacaataacaatagagccagaaaacaccttagtataaataccatattcatttgaacacctttgaaagtcagcagacaataaaacttgattgatagcttgattccaacaaaaaggagcttgttttaaaccataaagactcttgttaagcttgcaaaccataccagaaggagcatcaacaccatcaggaaccatcatataaatttcttcattcaaagtaccattcaaaaatgcagttgaaacatccatttgatggatctttaagtcaaattgagctgagatagcaagaacaattctaatactttcatacctgacaactggggaaaatgtttcaaaataatctaaaccataaacttgcctaaaaccttgagcaactaatctagctttgtaagtaggtggtgatgttgaatctttaatagtgaaaacccagcgacaaccaatagcacgacgaccaacaggaagaggaaccaaagaccaagtagtattcaattgatgagcatctaattcagtttggatagcagataaccaaaaggatctgtcatgtgaattaacagcctgagtaaaagtagttggtaaagcagatgaaacagtagtagatgcagaaaaagcagtatgaatggcattggaacctaaaaataatgctttggaacgcttaggaactgaatcaacaatatcagagagctgagacaaggacctttgcattggaacaatagcagatggttgagctggagcaagtgctggtgatgaagtggtagatgatggtgtagtagatgatgtagatgatgaagcaagtgtttctggtttgaaacatggcttttgcagtggaggttgagtaatagatgctgaagtggtatcacttctgtaacgacgtaatggaagtaaagatggttcaataggaacttgatgaacttcatcataaactggataagcaaaatcattaggaatagaatcaatttcttcttcatcaccagatgaaactaatttgtcttcatcaggaaaaaatttggagacatcattatcttcttgtgaaataatattatcaatagcatcagaaattggaacagaggcaacagtttcaggaacactaggagagttaggaaccatttcagtattatctggaacaaccccagaagattgcatcataggtgaagaagaagcagatactggagcagatgatgatgatgatgatgatgatgatgatgatgatgaagctggagatgatggtgatgatgaagtagttgaatgagcatccgaagtggatgaggaggaaggtgctggtgaagatggtgctggggattgaaccggtgaatgattaataataagaggttcagcagaattagaagcaccagatggaataacaggaacaccaccagcattaaaaccatagaaaatatcagaaggagaaacgtcctccataataggaatattgtttttagagtctaacattggaaaataggaatcatcaaatttgacattatttgaaacaacaacatcttgaatcctaggaataaaaaccctgtgagctttatgtgctggactatatccaacaaaaataccagcaactgagaccggtgaaaaaatgttttccctcttttcctttggaattaataccatgcatttacaaccaaaagaatgaaaaattgaataattaggaaccctacccatccataattcgtaagcagtcttaccattgagaacatcagatggatatctattgataataaactcagcagttttaacagcttcagaccaaaaattaaattgtaaaccagattcagaaaggagagttcttgctttttcttgaacagtacgatgttttctttcagcaacaccattttgagatgaattgtatggaacagtaagttgatgagtaatacctttatcttgtaaataatgttttaaatcattgttacaaaattcagtaccattatctgttctaataatactaaccttaaaacctttggatgagaactgagtttcagaaaagttgataaattgtttaataactgaagaagcagcagatttggttgccaagggtaaaattgaacaccatctggaaaaatcatcaacaattgttaaaaaatacctttcaccagataaaccaggaacattaataggaccacaaacatctgaatgaatcaattgaagaggatgaattgctttaaaagtagatgattttggtagaaccttagtcattttaccagcagaacagtgttcacaaattttaaattcagaggaaggagagtagcccaattccctcataaccctaccagatggatgacccaatctggaatgcatattcaagttgtttgcaattaaagagtagtttgcaggaataattggtgaaaaaataaattgatataaagtagctggaaaatattcaccaataattgtaccatcttgcatgtaacagtatctatcatcaaaggaaaacctagcgccagtgtttctagtaatcattttgatagaaattaaatttctggaagtattaggaacataagcaacattgctaattgaaattctttgaccattatgaccattgaaaataacagtacctctacccatgatttgtaaattatcaccagaaataccagaaacagtttcaacagaagtagctgaaacataatcactaaaatgttcaaagttcttagtcatatgaagattagcaccagaatcaagagtataagtatcactaacatgaacaggcgcagaaacatgccaagcaacatcactactagcaccttcagaattattaatattgttagttggcttagtggaaacaggaacagcagcagtacaatttggagaaatatgaccagattgttgacatcttctgcaaataacatcttttgaagtctttgattttctgtttctagatttcggcttgttagcaataaaagcttgagcagaaggagcaccattggaagatgaggaggtagcaatatccttgagagatgcttcaatagctgataaactaatttggggatcagcagcatctaaaattcttgaattgaccgaaggatcacgaaacatttgtaggtataaaagacctaacaggtgatcaatagtcatgccatgagtaaattgagatctcatggtctttaaaaataataatcctttgtcaagtggcatagaggatgatttagttaatttgtcaaccattgaataaagttgacgagcagacaatctagaataatctcttctaattgctgctaataaggcagaaccagacaagccttcacattgataattggaaataatgttaccatcaacggtattaataaggacaacttgaagggcccggttaagataaaatgttaattgaacaacactagggtcatcggccggagtatccggtgagactaataaatcaccgtcagtaaaaaattccaataaaccggacccaaaagtagctaaaatggagcgaacaccaacatcccaattgtgataattttcagcagatttcaaagtattaatagatgactttggacacaagtgagagaatgaacatatctcaacaccattgtaatatttcaggtctcttggcataagctactctatgacaatagacaagaaatttaatgaaattgttgataaatgtaaatgatgatgtttgtgatgttggcggacagattaagatatttatggagaattgtggtgtatttcgttgatttgattggtttttgataaatttgaatatatggatggtgatattacattcattaataacatgtctaattggcgtcccgttgaatggaaggccacataggcagctactgtaaaatgtattgtttagtaatccggtgttaagtgcatataagtagtagtaatcttggggcctggtgaagatatgttgattgatgctgttaaagaagtttttccattcttggtcacccagctgtgcattgttggcccaagttttagtattggtgctgatatagttgatgttttggtggagtttggaagatagatgatttaagtcctggtaaaggatatttgaaggttgttgggatttatttctattcaaaaatcgattctgcaatttggtttgtaggatgttgttgtatgaggttatggtttgaggctggttgatggtgttgcaggtgatgtgatcagtcatttccaaatcttcaactggaagatttggtagtgtaactgtattcctccatgctgttaggtaggtttggagaggatggtagatgggtgtttcaggagatatatttacttgtagaattatgtcactgctgagggaggtgtgagcaggtggtgggtatggccctagtgatggaggaatgatgttatgatcaaggtaccaggcttcttgttgatttcgttcatcaaaatgttgttgtctgtgttgctctctgtacatttccgagtatctgacggttatttttgatggttggatggatatttgtgatgttgatggaagttttaactggttggaaaaatttgtggtcagtaagtaccatggtgtaaaatgttgaagatgctgaagatattgggtgaagtgatgtgaggtttggatagtggttggatgttgttgattcagttgtattgcttcattgacttgagtttgaatggtgttaatggtattgttgaagtattgagaatatagcagatttgatcgaagattgattcgcagaagttggggtaggtatggatgctttgcacccgactgggagggatcgagcatgtatagtatgaaaaatgcttttcttccctgaagttgggtttcaagatccatcattccgaatcctccttgttttcttgggatgtaccaatagtctttgtttgtagggatttttggccatatttgatttctgactattgatttaacattgttgataaatgattgtaagatgggtgtaggtataggatcatgttgatctaagaagtaaatggtagagaagatgtaagtgttaatcccaagtataattaggtgaagtggaaggtccatgaagcatattcttcttaatcgggaggttagtaaatccagctttttataccagttggttttcatcaatggtactcctaggtaggtcggattttcggtgatggaagtcacctcaatatcatctgtgattgttgatttgatgtgttggatgatgggttgcaatatagttttgttttttggtgattgagttttagaccactgatgttttcaaattcagagaaaatctggatggttttgttgatgtcgacggagtcttggttaaaagtgataatatcatcagcaaaagcctgactttttacttttttgtaaaattgttgagggtggttgatggagtgaatgtggtcagagggttatagatgataccgttgatggtggagtttattttgtttaataagggttccaagcaaagattgaagatgagtgttgagatattaatctaaactaggattcgaacccgtgactataagaatcaaaacctttagaagaagaaaccctcaacaagaatttgaaaccctcaccataagaagagaaaccctcgtcaagaagttaaaaccctcaccttgaaaaatgaagtttttcaaagtgaaaatcttattatataaaggaacatgtttcccacttttataattttttatttcctcttattttctttatattatttattttacttttgtttatcttatttaaataacaatacaaactatattttaacttgcttattaaaatggattttgctaatagaattacccttatacaacaggttatgagttcattctctcacttgtgtccaaagtcatctattaatactttgaaatctgctgaaaattatcacaattgggatgttggtgttcgctccattttagctacttttgggtccggtttattggaattttttactgacggtgatttattagtctcaccggatactccggccgatgaccctagtgttgttcaattaacattttatcttaaccgggcccttcaagttgtccttattaataccgttgatggtaacattatttccaattatcaatgtgaaggcttgtctggttctgccttattagcagcaattagaagagattattctagattgtctgctcgtcaactttattcaatggttgacaaattaactaaatcatcctctatgccacttgacaaaggattattatttttaaagaccatgagatctcaatttactcatggcatgactattgatcacctgttaggtcttttatacctacaaatgtttcgtgatccttcggtcaattcaagaattttagatgctgctgatccccaaattagtttatcagctattgaagcatctcttaaggatattgctacctcctcatcttccaatggtgctccttctgctcaagcttttattgctaacaagcctaaatctagaaacagaaaatcaaagacttcaaaagatgttatttgcagaagatgtcaacaatctggtcatatttctccaaattgtactgctgctgttcctatttccactaagccaactaacaatattaataattctgaagtttctactaatgatgttgcttggcatgtttctcaaccaattgttcatgctggtgacacttatactcttgattctggtgctaatcttcatatgactaagaattttgaacattttagtgattatgtttctgctacttctgttgaaactgtttctggtatttctggtgataatttacaaattatgggtagaggcactgtcatttttaatggtaataatggccaaagaatttcaatcagtaatgttgcttatgttccaaatacttccagaaatttgatttccattgaagcaattactaggaaaactggttcaagaatttattttgatgaaggttattgttatatgcaagatggctcagttattggtaagtatttttcaaatactttgtatcaatttattttcttaccaattatctctgaaaattattgtttaattgcaaatactttgaacatgcattccagattgggtcacccatctggtagggttatgagggaattgggttatactccttcctctgatgttaaaatttgtgaacactgttctgctggtaaaatgactaaggttctaccaaaatcatctacttttaaagcaactcatcctcttcaattgattcattcagatgtttgtggtcctattaatgttcctggtttatctggtgaaagatattttttaacaattgttgatgatttttccagatggtgttcaattttacctttggcaaccaaatctgcagcttcttcagttattaaacaattcatcaacttttctgaaactcagttctcatccaaaggttttaaggttagtattattagaactgataatggtactgaattttgcaacaatgatttaaaacattatttacaagataaaggtattactcatcaacttactgttccatacaattcatctcaaaatggtgttgccgaaagaaaacatcgtactgttcaagagaaagcaagaactatcctttctgagtctggtttacaatttaatttttggtctgaagctgttaaaactgctgagtttattatcaatagatatccatctgatgttctcaatggtaaaactgcttacgaattatggatgggcagggttcctaattattcaatttttcattcttttggttgtaaatgcatggtattaattccaaaggaaaagagggaaaacattttttcaccggtctcagttgctggtatttttgttggatatagtccagcacataaagctcacagggtttttattcctaggattcaagatgttgttgtttcaaataatgtcaaatttgatgattcctattttccaatgttagactctaaaaacaatattcctattatggaggacgtttctccttctgatattttctatggtggtaatgctggtggtgttcctgttattccatctggtgcttctaattctgctgaacctcttattattaatcattcaccggttcaatccccagcaccatcttcaccagcaccttcctcctcatccacttcggatgctcattcaactacttcatcatcaccatcatctccagcttcatcatcatcatcatcatcatcatcatcatcatctgctccagtatctgcttcttcttcacctatgatgcaatcttctggggttgttccagataatactgaaatggttcctaactctcctagtgttcctgaaactgttgcctctgttccaatttctgatgctattgataatattatttcacaagaagataatggtgtttccaaattttttcctgatgaagacaaattagtttcatctggtgatgaagaagaaattgattctattcctaatgattttgcttatccagtttatgatgaagttcatcaagttcctattgaaccatctttacttccattacgtcgttacagaagtgataccacttcagcatctattactcaacctccactgcaaaagccatgtttcaaaccagaaacacttgcttcatcatctacatcatctactacaccatcatctaccacttcatcaccagcacttgctccagctcaaccatctgctattgttccaatgcaaaggtccttgtctcagctctctgatattgttgattcagttcctaagcgttccaaagcattatttttaggttccaatgccattcacactgctttttctgcatctactactgtttcatctgctttaccaactacttttaatcaggctgttaagtcatatgacagatccttttggttatctgctatccaaactgaattagatgctcatcaattgaatactacttggtctttggttcctcttcctgctggtcgtcgtgctattggttgtcgctgggttttcactattaaagattcaacatcaccacctacttacaaagctagattagttgctcaaggttttaggcaagtttatggtttagattattttgaaacattttccccagttgtcaggtatgaaagtattagaattgttcttgctatctcagctcaatttgacttaaagatccatcaaatggatgtttcaactgcatttttgaatggtactttgaatgaagaaatttatatgatggttcctgatggtgttgatgctccttctggtatggtttgcaagcttaacaagagtctttatggtttaaaacaagctcctttttgttggaatcaagctatcaatcaagttttattgtctgctgactttcaaaggtgttcaaatgaatatggtatttatactaaggtgttttctggctctattgttattgttgctctttatgttgatgatttattaatttgttcaaataatcctgctgccatttctgatgttaaaggtcttctctcttctcactataagatgaaagatcttggtgttgcttctaggtttcttggtatgaatttacatcaatctgaaggaagtgttggtttatctttaaatcactatctcaatgattatttggttgattttaatatgcaagattgcaatcctgtttctactccatttgctgctggtactgattttttgcctggtgatgctatttctgatgctgatgttacccgttttcgcagcatggtagggaagttattatttgctgctaacacttgtcgtcctgatttgtcctatgctgcttctacattatcaagattcattaaagatccaagagctaatcatattgctgctgctaaacatgtcttaaggtatattaaaggtactgtatcatttggtttggtttataagaaggtatctaattttcaattgattggttttagtgattcagattgggctggtgataagtttgatagaaaatcaattactgggtatgtatttatgatgtctggctgtgctattacttggaagtctaagaaacaacccactactgcattatcatctactgaagctgaatacatggcacttggtgatacagttaaagaactactttggttaattcaattgcttaaaactgttggtcttaaattcaattatccacctacaatttttgaagataatgaaggttgcaagttgcttacaagtcatcctgtccatcatcaaaggacaaagcatattgatatcaaacaccattttattagagagcatttaggtaacaaggttttcaatttggaatcggttagaacagatgaaatggctgctgatatgtttacaaagaatttgaatagaatgaagtttagaaaattcaactgtaagattggtatgactcctatttcacattttggttaagtttagattatggtagggtgttgagatattaatctaaactaggattcgaacccgtgactataagaatcaaaacctttagaagaagaaaccctcaacaagaatttgaaaccctcaccataagaagagaaaccctcgtcaagaagttaaaaccctcaccttgaaaaatgaagtttttcaaagtgaaaatcttattatataaaggaacatgtttcccacttttataattttttatttcctcttattttctttatattatttattttacttttgtttatcttatttaaataacaatacaaactatattttaacttgcttattaaaatggattttgctaatagaattacccttatacaacaacaaactaaagatccaacaaacgaatttatttgatacttattacttccattacgtaataaagtattatccactatcttacatattttcgtttacacatggtagcaccggctagtgtttgtgttacaaattaaattaaaattatactagtcaactatgtctgcaacaaaagataagattcttgctttaaaacaacaaattaaacaattaaaattaaaccaaaaaacccctggattaataatattgaatatccaactcctattaaacgttcatattatcgtccataccgtttcaataagtttaaacctggttatcatcataagaataaattttttagaaagaaacaattcaaacgttttaatccaaattttactcctatgggtaacaataggtcaatgcattcctcccgtacttttaacaatttaaataataaaatgtctaataataacagttctttttcttatattgttccgccagtaaatactcaagttaaagttgatcatctaaatgtcgacaaggaagaaggtgatatagttgttgaaaattctcaaagggtgattccaagagatgagattattaagaagggtgattcctctgaagttacattgttaaagggtgattccaaacaagaaacaaataatccaactttaaacattcctttattacctgaaattttacatgttaatgctttgaatattgaaaatttacggaaattagatgtccaaattgataataaaaattccgcatcagcaattattgatactggatctaatacagatgctataactacaactttatgtgatgaattattagtatcaaacaagattagattatacattgagccaattaaagctattttagttaatgatactgttgatgctattggtgaaatcgacttatttattgatgttgatttatttaataatccaattaaggaacaaagaacatttttagtcttgaaggcaaataccaataaatttattttaggacttccattttttaaagaacattatgataaattagatatacatgattttattgaagataaatttacatcaccatctattaacgttaatttaattgaatttcatgatagacatatttctactattgttaataataaagataatgattcatatttaatatatattaattcaattaatgctgaatcttctgaagaaagtgatattaaaactattgataaagaaattaataatgaagaagttaatagatatagaaataatattcttgaagaatttaatgatgttgttactatgaaggagcctaatgaactccctcctaaaagaaatcatgaacataaaattattttagttgaatctaataaacaagttaatagaaaccaatatcctttaagttatgcagaaaaggaagaattaaccaaaactgttgataagttaatacaacaaaaatttattaaggttagtgatagtccatataatagtcctgttttatttgttaagaaaaaagatggaaccatgagaatgtgcattgattatagattattgaataataatactgttaaagatagatttcctttacctcatatcgaagaaattatttccaaatttgaatctgctgttgtttattctaaattagatttgatgtcaggttattatcaagtaagaatccaagaagaagatattcctaaaactgcttttagtactgattatggtcattatgaatgggttgttatgccttttggtcttactaatgctccagcaacgtttcaacgtatgatgaataccattttatccaaatatttaaatgtatgtgttcaagtttatttagatgatatttttatttattccaaatcatataagcaacattatgaagatatcaagaaggtattatcaacgttgagagaacatcatttaattgctaagaaatcaaaatgtgctttcttttatgatgaattaagatttttaggtcatgttattactaaaaatggaattaaaactgatccagataaaattgaaaaggttaaaaattggccaattccaactactgtcaaagaagctcaaatgtttataggtttaacttcatattatagacgttttattaagaatcattctaagattgctgtaccaattcataaatttattactaaagaatctaaatgggaagatgaacaaactaatgcttttaatcaacttaaagatgctttaattaacagtcctattctagtacatcccaaatggaataatgattgtacttatgttgttcatactgatgcttgtggtagtgctttaggttatactttagaacaattagatgaaaatggtaaaacaagaggtacaattgcttatggttctaagaaattaataggagctcaattaaattatggtatttatgatagagaatttatggcagttgtagaagctttaaaaaattggagatattatctattaggtagacattttgttattgttactgatcataaaagtttaatttatttacgttatcaaaatttaattgattcaaccagagttgcaagatggcttgattatttatcacaatatgattttgaaattcaatatgttgcaggtaaagataattctgctgcagatgctttaagtcgttatccatatgaaaaattgtctgttaaagatgctttagaagttaatcatattaaatttttaggtagttcaaatagattttcaaataataataacattcaaattaataatactgaagttactgttactacttttcctatgaatgatgaattaaagaaacaaattattaaaggttatcaaaaagatgatgtacttgctgatgtttattctactctaaaagataaaactgaaattcctattcatttaaaacatcatattaaacattatcaactcaaaaatgatttactttattataaaactttacttgaacaagattgcaatagattagtcattcctcgttttaacaaattacctcaaagatttattaaaaatgctcataataatcctactgctggtcattttggtccttggaaaacttatcaaactttaatggaatcattattttggtttaatatgatgcccacaattaaaaggtattgcaatagatgcattgtttgtcaacaaaataacacttctactcaaaaaactcaaggtttatttcaaccattacctgttcctgaaggtagatggactgatgttacaatggattttgttactggtttgccaacaactacttcaaatcatgatatgattatggttattactgatagattttcaaaaatgtcacattttattccaactgtgaaaactttaactgctgaaggttgtgctaaattatttttagattattttcttaaacatcatggttttccaaaaagattaactagtgataaagatattaggtttatgaataaattttggtatactattcattttttatttggtgtttctttattattttcaactactaatcatccacaaactgatggtcaaaccgaaagagttaataaagttttaaatcaattattaaggaaacattgttcaaatgatcatttacactgggatgaatttttaccaatgtgtgaatttgcttataatagtacttaccatgattcaattaaatgttctccttttgaattagctataggatataaaccagattctatgaaaagtgttaatagttggaatttagatgataatagatatagtccaaatgctgaagaatatgctagacgtatgagattaactttaactcaagctcaagataatattgtacaagctcaaagattgaatgaaaaatatcataatagatcacatagattctataattataaagttggtgattatattttattacatcgtgatgcttttggtgcttttgctaaatattataaaattcaacctgcttattatggtccatttaaattggtgaagaagattaatgataatgcttttgaagttgatttacctaagattaataaaaaggatagagtattaaatgttaaaaattttcgtccatatgttcctccagttgatttattatgtcgtccaccaagaactaatgctgaaattttatcaagaattaatcaaatgtgtggtattgctggttttgatgaagaaaagaatacttttgatgtttattggagagattgtgatcctttacatgctacaactattactgctgatcaatttaatacggcttctgaatcacttcgtcatagtttatttcataatgccaagatgatttgtgctcatgagcaaattgtttaattattatgttttaattttaacatcagggacgatgttttccaacagccggggtaatgtaagggaataaatacaagttgttcaataatatccacgtgaggattaggtaagctgattacgtaaataataagatgaaaattgatatattcggttattcggagattcggagttataaggaaaagataagaatgaattagaataaattagttaattacttttgacaggtttgataagaatacttttgggaatggtctaattaattacgataaggaatacttcaatagataaggagtggtatgattgataaggaatagtttaattaattatattagggaatggttaatagtgtaatataaataagtatgatatcctgtataactttgtataactctcttctgagaggggacattaatcagagtattggttagggaagaatctactaattaataccaaccgtctcattgctatctcgcttgttgtacacaaactaaagatccaacaaacgaatttatttgatacttattacttccattacgtaataaagtattatccactatcttacatattttcgtttacatgctattgtaagggaataaatacaagttgttcaataatatccacgtgaagattaggtaagctgattacgtaaagatgataagatggaaatgggaattccgagatacggagatgcggagatgtcggagtaagaaaggaatgacttagattgaaattgaattaattatgataaggagtggtatgattgataaggaatagtttaattaactatattaggaaatggttaatattgtaatataaataagtatgatatcctgtataactttgtataactctcttctgagaggggacattaatgagagtattagttagagaggaatctactaattaataccaaccgtctcattgctactcgctgtctattacacaaataaaagatccaacgagtaaactatcttatacttattacttctattacgtaattaagtattatccactatatcgtatattttagtttacagctattgtaaagtattaggaggctattgtagatagtgtactaaaaaaatcttattcttaggtttcaacacttcacaataatcacacaaaataataaacaatttaaccatctattacatttctttatcagttcatttactcattaagttctttttcatttttcatttaattttacaatataacaaaagggttttataggattttcctttcccttaaccggactgaatgttttattatatagcatttattttagagaaaaatatttatagtatcttttataaatttatagtaatacagaagttgactggaaaaaaaaaaaaaaaaaaaatcaaataattaatacttatgttgaattttttcaatacaataaagatgttgtaatctgattactctagatgcagcgtccattattaacaacagtaaaagttattttaaataaactgaataaaatataaataaatataaaataaataagaaaaacaacaaaaaagtaatattaacaaaccttgaaattttcgttttatttatactaagaattccaacgttgactaataatttcttttctgatttgcgagcaacactaaattttgtgttgtataagggtaatcctattagcaaaatccattttaataagcttttaaaatatagtttgtattgttatttaaataagataaacaaaagtaaaataaataatataaagaaaagaagagaaaatacaaataataaaagtgggaatacatgttcccttatatagttatcaaaatgaacatgaaaagcaagtgcttacccctctttgaacaaaacccctccgagcggggtttttttaaagtgtgaccatcttcgggagtaagggatgtgtgaccgtcttcggcaacatggaaatgaagatgcggggtaaggtaccccactttgagtttagattaaccatctcaacattttgattggttcttcgaggctcaacttaataatacaatattataatttattattcagtctcactcagaattaccaatctcaacaatctcaacaaaagaataataactgtaactaattgtacttaatactactatgcgaatactgtcggtggaactggtatgcgagtagttagttaagataaagttagataataagttatcacaaccaactctcatatattgaaatgtcccgctcaagagagcttatacatgttaattatatagtatttagaactgtaattaattatctcacaagccagcccgattcaccataaggtagaatctattattcagttcttaattatattttgttgtgaccaaaatcagcatcaagtggagagattgtaaaattgtaaaatgaattaattaattaactaatttaattaatgtgatcctatcccatcactatattaacaaacgttgattttctgatctgtcaaaatcatttattcattttatcatttaatcttaatttatttattctctttaattactattattatttgaatctcactttcatcctttaccacttgtaatgcctctattgattataatattgatattcagattatatcactaataaaattcgtattacttatagctactaaaagtaaatttatctactatacttgataatagtaatttacgtaagattttttgttaacgcgcggtattgggttcaatcttatagctacagtcatttgatttcaatctacacaatacccccaccatgctgtaattttacgactctttggggaggatccatatttatgacaacaccaaaagaacaaattacatgttatagaaacacaaaggcaaacaacatatagttaatattatattatacctttgttagtaattaagtgcgtgtctttttcaactatgcttacataataagtgtgtcttttttaatgttgattacataatctttatcttcattatactctgtcttttatactgttgctctaatgggcattggatgtttcaatatcacaaattctttcttgcattttactccttatacccatacaacgtattagtatacaagatggaatctcattcatcagatgattcaatggattttttatcagatgcagattctaatgattttaatgatccatcagaagctagtcaaaggcaaatgtatagaacaagtcttactccctcacttaatttgaattctgctgataataatgtaaatgatgaagtattatcagacaattttatacgtctgataagagctttgaaattgaaaactgataaactttgtggaaaatggaaaaacattaatttatgggatacattgatgagccaatggagaagtgaagtattaaagatatctactttgacccattgtttactgctgaagaatcagaaatggatgataaaccatttttgatgaatttaacaagagaagtagttattgattattggaaaaacataactggtagagagaaagagagcttttctctcatgtttagagctgctggtatgccactgaacttttaaccaagaaaagaagaactgggattacaaattttagccaggaaaaaacacaggatatgtgctccaaaatcatattggaggagatgattatttttacaactttactccatcaaatctttatgaagttgataaacataatgattactgtattagtgttggaagttttgcaccttttatccgattgaacaaagagatgattttccatatccattatactctacatatattcttaattgtataatagatgttaaaagagtgggtgtattatttgcaccttccattagtagagaaactggcattcaaaaaaattgacattatagaatcaatatggaaacattcattttctaaaatggaagaaacattagatcccattaaagcttacaaaacaatatttaaacacaattttgctactcctccagaacttttaaagttgagatttgaacaagcagctaagatcaataatatgaattcagggattattgtgctttaactttcccacaaaaacaaaggctgtccctgtttttgaaaatataaattgggaagactataatacctgtttacgtgaatatgaaaaggccttggcaaataaacaaatcatcacgaaaataaacaaacaatacaggttaatggatatgggtaagcaaagtgtggtcagttcatttaactattatgaatcatcagattcaggcggtgccttaatctattcttcgaaaaaatgtttagaagctcttgcaaatgccacatggtggagttctgatgctactttttgaatgttaagagatagttcgattaaatttattacagtatcaatcaaaaaagaaggtaggtattggtaaaaaagcaagatatttctatgtgctatgggccacattgcctggcaatgaaagtagtgcaaactataccatgtttttttaagaagctgcatcagttaataagggaaaattattcaggtgatatcaaattaaatacaatcatcacagatgaatcgagggcagaaatggctggtatttcagaagcttttaacaatagggttaaagtgacaaattgcgtttggcataaaactatgaatatagaaaaatgattaagtatgaatcacgcttatggtattattgatgctatgtatactttttctaaaaaaaactttttgaaaatttttgtttctgttgtttaaagctgtcatgataagggttcagagttgaagaagaagttgaaaaagacgagtcaaataatttgtaatcgaatgacggtcaaaagagtgaataaaaagaatgggagaattattgttttggaaactattaaacaaagcatcaaattgtacgaagattgtattaggtatttatattctttttatattactagatttagataagcgttgtgttatcgagtagaagattatactgatgggggatctgatgttgaagatgctagcaatatgtttgtcgtggccaaagaaacaacagatgatattatggactctttcaaggaaataattaatgttcatccaaattctgcttaatttgtagacatacttttgcaatttaaagaaaagttggatgattataaaagaaatgaactttatccaaaatctaaaaagtaatttgtttgaattgtttataatattaaaatttaatgcctttaaaaatatgaggagataaaattaattgttgatccttcaccgcaaaattttaaagaactaaattttttaaaatttaaccagagatataattggagggcaagaaggtaggttattattaactatacatgtactgtaaaacacgaataagtgaattacacaaaaaatttaatattgaaataaaaatacataacatacacaaaagttcatcattcttttacaccacagtttccggcttttttgcaactttacgttcatatacccacttaattaaatcaaagtttatcaagataaaaattaaaccttcagtatctttcccatccacacctacatccacaacttcctttaacttttctttactaattcttttcacaaaaatatttttttttgatttatagatatcattgtgacatttttcccagttgaactttgttgagatggttaatctaaactcaaagtggggtaccttaccccgcatcttcatttccatgttgccgaagacggtcacacatcccttactcccgaagatggtcacactttaaataaaccccgctcggaggggttttgttcaaagaggggtaagcacttgcttttcatgttcattttgataactatataagggaacatgtattcccacttttattatttgtattttctcttctttttctttatattatttattttacttttgtttatcttatttaaataacaatacaaactatattttaaaagcttattaaaatggattttgctaataggattacccttattcaacaaacgggtaacatcaacatcagaaatagcatcaccaggcaaaaaatcagtaccagcagcaaatggagtagaaacaggattgcaatcttgcatattaaaatcaaccaaataatcattgagatagtgatgtaaagataaaccaacacttccttcagattgatgtaaattcataccaagaaacctagaagcaacaccaagatctttcatcttatagtgagaagagagaagacctttaacatcagaaatcgcagcaggattatttgaacaaattaataaatcatcaacataaagagcaacaataacaatagagccagaaaacaccttagtataaataccatattcatttgaacacctttgaaagtcagcagacaataaaacttgattgatagcttgattccaacaaaaaggagcttgttttaaaccataaagacttttattaagcttgcaaaccataccagagggagcatcaataccatcaggaaccatcatataaatttcttcattcaaagtaccattcaaaaatgcagttgaaacatccatttgatggatctttaagtcaaattgagctgagatagcaagaacaattctaatactttcatacctgacaactggggaaaatgtttcaaaataatctaaaccataaacttgcctaaaaccttgagcaactaatctagctttgtaagtaggtggtgatgttgaatctttaatagtgaaaacccagcgacaaccaatagcacgacgaccagcaggaagaggaaccaaagaccaagtagtattcaattgatgagcatctaattcagtttggatagcagataaccaaaaggatttgtcatgtgaattaacagcctgattaaaagtagttggtaaagcagatgaaacagtagtagatgcagaaaaagcagtatgaatggcattggaacctaaaaataatgctttggaacgcttaggaactgaatcaacaatatcagagagctgagacaaggacctttgcattggaacaatagcagatggttgagctggagcaagtgctggtgatgaagtggtagatgatggtgtagtagatgatgtagatgatgatgtagatgatgaagcaagtgtttctggtttgaaacatggcttttgcagtggaggttgagtaatagatgctgaagtggtatcacttctgtaacgacgtaatggaagtaaagatggttcaataggaacttgatgaacttcatcataaactggataagcaaagtcattaggaatagaatcaatttcttcttcatcaccagatgaaactaatttgtcttcatcaggaaaaaaattggaaacatcattatcttcttgtgaaataatattatcaatagcatcagaaattggaacagaggcaacagtttcaggaacactaggagagttaggaaccatttcagtattatctggagcaacaccagaagattgcatcataggtgaagaagaagcagatactggagcagatgatgatgatgatgaagagcttgataatgaagctggggatgatggtgatgatgaagtagttgaatgagcatccaaagtggatgaggaggaaggtgctggggattgaaccggtgaatgattaataataagaggttcagcagaattagaagcaccagatggaataacaggaacaccgccagcattaccaccatagaaaatatctgaaggagaaacgtcctccataataggaatattgtttttagagtccaacattggaaaataggaatcatcaaatttgacattatttgaaacaacaacatcttgaatcctaggaataaaaaccctataggctttatgtgctggactatatccaacaaaaataccagcaactgagaccggtgaaaaaatgttttccctcttttcctttggaattaataccatgcatttgcaaccaaaagaatgaaaaattgaataattaggaaccctgtccatccataattcgtaagcagttttaccattgagaacatcagatggatatctattgataataaactcagcagttttaacagcttcagaccaaaaattaaattgtaaaccagactcagaaaggagagttcttgctttctcttgaacagtacgatgttttctttcagcaacaccattttgagatgaattgtatggaacagtaagttgatgagtaatacctttatcttgtaaatagtgttttaaatcattgttacaaaattcagtaccattatctgttctaataatactaaccttaaaacctttggatgagaactgagtttcagaaaagttgatgaattgcttaataacagaaggagctgcagatttggttgctaaaggaaaaattgaacaccatctggaataatcatcaacaattgttaaaaaatatctttcaccagataaaccaggaacattaataggaccacaaacatctgaatgaatcaattggagaggatgagttgctttaaaagttgaagactttggaagaaccttagtcattttaccagcagaacagtgttcacaaatgttaaaattagaggaaggagtataacctaattccctcataaccctaccagatggatgacccaatctggaatgcatattcaaagtatttgcaattaaacaataattctcagaaataattggtgagaaaatgaattgatacaaggtgtttgaaaaatactcaccaataactgagccatcttgcatgtaacagtatctatcatcaaaataaatcctagcaccagtgtttctagtaattgttttaatagagattaaatttctggaagtatttggaacataagcaacattactaattgaaattctctgaccattatgacccttgaaaacgatagtacctctacccatgatttgtaaattatcaccagaaataccagaaacagtttcaacagaggtagcagaaacataatcactaaaatgttcaaaattcttagtcatatgtagattagcaccagaatcaagagtataagtatcaccagcatgaacaactggttgagaaacatgccaagcaacatcattagtagaaacttcagaattattaatattgttagttggcttagtggaaataggaacagcagcagtacaatttggagaaatatgaccagattgttgacatcttctgcaaataacatcttttgaagtctttggttttctgtttctagatttaggcttgttagcaataaaagcttgagcagaaggagcaccattggaagatgaggaggtagcaatatccttaagagatgcttcaatagctgataaactaatttggggatcagcagcatctaaaattcttgaattgaccgaaggatcacgaaacatttgtaggtataaaagacctaacaggtgatcaatagtcatgccatgagtaaattgagatctcatggtctttaaaaataataatcctttgtcaagtggcatagaggatgatttagttaatttgtcaaccattgaataaagttgacgggcagacaatctagaataatctcttctaattgctgctaataaggcagaaccagacaagccttcacattgatagttggaaatgatattaccatcaacggtattaataaggacaacttgaagggcccggttaagataaaatgttaattgaacaacactagggtcatcggccggagtatccggtgagactaataaatcaccgtcagtaaaaaattccaataaaccggacccaaaagtagctaaaatggagcgaacacccaaatcccaattgtgataattttcagcagatttcaaagtattaatagatgactttggacacaagtgagagaatgaactcataacctgttgtataagggtaattctattagcaaaatccattttaataagcaagttaaaatatagtttgtattgttatttaaataagataaacaaaagtaaaataaataatataaagaaaagaagaggaaatacaaataataaaagtgggaatacatgctcccttatatagtaagattttcactttgaaaaacttcatttttcaaggtgaggtttttaacttcttgatgagggtttctcttcttatggtgaggtttttaacttcttgatgagggtttctcttcttatggtgagggtttcaaattcttgttgagggtttcttcttctaaaggttttgattcttatagtcacgggttcgaatcctagtttagattaatatctcaacaaaaaacaatgaagtaggtaatctcaatatcgatagtgatgtatctagtatgaatttgaatagtataagtactgccgatgctgtgaataataatgattttttatttaataacaatagtcaagctcaacttactccctcaagagtatttaaacaaacttgaatccattcgatgataaaataaagatgcatcaatacacaagaggcaaatgttttagttgaaaaaataaaatattcaatcccaaacacatatagagaagctattaaaattttacaagctgagcaatgaaagaaagctgtgatagaagaacttagttcaatgaacaaggaaaagtttaaacattagttattaaatcaaaaattacttaaggtgctttagttgttggaagatgagtgtttagtttaaaattagatttagtgaaaagaaaagaaatattcaaaggtacaattgtggcaaatggatttacgcataagaaatatgctttttcccttgcaaaatttgattgtttgaggttagttttttgtttatctgccatgaggaaatgggatatttcacagctgtacactaaaactgcttttttgaatggtaaattagattatattatttatttgaaagctccagatggaacaactaaaaatgataatttggtttggaacagaagttcatgttgtttggagcagtctccaaaaatgtggtatttaacagtcaaaaagttagttgatattgggtatagaaaatcaatattagaacaatgtttgttttaatttttaaaaaattgatgtcatgatattgttattgttgagattggtaattctaagcgaaactcaataatacacaataatactgtattattaagttgagccttgaaaattgattagagctaagtattgctcgcaaatcagaaaaagaaacagaaacgttacaaattagaaaaagaaacgatagtaaagagtggaattctaagtacaagtagaacaaagaattcctaggtttgatatcaagtctgtttatattttgtatgatcttagttattttataagttatatatagttggttcttttaatactgttgttgttgtaaaatataggtcctgcccaaagagtcgttagattacaacacatccttgtaaatatgggaaaatattagaataaaccattaatgatgctaatgtttttgaagaagcttcatttttttttacattaatttcattaaaatatacaattttatacagaatatcacagatacatatttgttattcaaatatgaaaaatttagttcttattagatctaaattagatggaaaagattgagaataatcaaacagaaataatttacatttagttcagtatatgaagatatattgaattgatgaagcatgaataatatatgcgtagaaggtagcattgtttgttaaaaaatataattaatttgattgttatatttgccacataagcttctttctttgttaatattaaaccaacaatattctttagatcaatttttatctctaattcttttagaattacttcaattcctttacagttgaaaaagacatgatgagtcccaccttccccttcgcagaattggcaagggtgataaaaatgggaattcaacattcctgtttgtaattcaaataattcattataatcaacatggttttgattggtgattctacccaaccaaccaaagcatgcttcccaatccaattggttttctattttaccatcccaataatctgaattaaatttatccttaaattcttctttgtaaaatctttttgaaaaatgtttaaatgattcaatattgatttcctgatttttattgaaaatttctacaattttccatttttgaacatttttttccaccattgaaaataaagatgttggattgaaatctgtagtttctttaacctgaaaatctgagtgaatatcagtcaaataataccatcctcgcaaatatgggaaaatattagagtacaccattaatggtgctaatgtttttgaagaagcttcatccatgttgtaatttacagggtgttcgataatgaaattgatatttggttcaagatcgattattattttccctgtatttacatttattattttaggttttgcaacctttaacatttcatttgaaagagtttcttcaatggtaatatatcttccccatattttatgatttttatgcagaagaagattgaacggatatgttaaaattaatccattggaaatagtacctggtatttttatttttggtaagtttccaggtacagctctatttgatagtatgtaattttcaacatatttgtaataacaatgataaccgtagtgatttctgatcataacattaataattccttgtaatgagtgtgagattattaatgtcaaaggatgctcatttataaattttaacttctgtttaatagtcgttatataaatgaaatatgctcttttaccttgaagctgtttaccaaggtcaatcagacccatacccccatttttgtgaggttgatgccatttgattcttctaactgcacttttcagcggtaaatatttaactaattcttttttaacatgattttcaaaagaatttagaagaggatccggaattggatcatgttgatcaaaataatagatagtggaataaatgtaagtattaacagctactactctttgatataaatttagatctaaaaacatagttttccttagtcttgttttcaattggtttattttattgtaccagttgattttcaacaaggggattcctagatagataggattttctttgatatctaaaattgatagcttcaattgatttatattagcaaattgtttgatattattgatacctttattattaataaaaattattgatttcttttcatttattttaagatccaaaattcgagcaaaattatttaaaattgatattggttttaatagtctagtaataatatatgatgttcattggataatgacggtgatgaattgatttaatttgcaagaatccttgcagtttcaatatgtaaatgaatatttctgtgaagcataaatgtttgttgatgatgggaaataatcctgtttgcaataggcataattctattagaaatagaaaagttgattaatctaagtgatgaatttgtaagactgataggacgtagatcatctattgatggaagatcttgtcgataactctttttgggaattaattttatcaatactttaccaatcttatcggttgtggttgccttgaagaatgtaatttgccatgttagttagaatcactgcagcaaaaacccagttgtttttccaatctctgtaagtattaccatcagtccctggtgatgatggaccattttcatttagccttagaaggtttttatatatctcttgttttgaaaaaggtttaattaaatcattttcctctttctcagttaattgttctttaatattttcagtgaacttatcaaatttgctatttaaattttgatttgaataaatttcttttgatgcgaaaagatatgaataaaatgaatttgcatcagttataatattttcatccaaatttgcttcatttgaatgttttccaaatctaagtctaagtctcttgaagttttttgagagattagctgagatattattgaattgaggatcattaaaatagaatcctaattctttagatgatattttttccttatatgaaggtaaatgtttcattatctgaatcactttatttgttttccagcgaactctttgcatatatgcattataatccattgatgggtttttagtatccagaatctcattggtgaaaatgtatttatataattgtttattttcaataatgtaatcatgaattgatggtattcttttgtaaaaattatctttattaattatattattattagaatttgaattgatatctgataatgtacatactaccggtctatgtgttgtaaacggtagcttttgatgtactcaatatttaaaattgatatttcttagcagattgaaggaaacatggaaacgatctagccgattatttgttccatttgaacagtggttggtataacatatacttcttctattatttggaaggaaaaaaatatcatataaattattttccattaattgttgatgaagaaatgattcgatacgatttaaatttgttgcttccataggatgtgtattccaatcaccacagatgattagattattttcaccacgagataataatgataaagttggacataatgtgttaataaaatcttttttgttaatgcagtggaatctgttatcattaatattattgtaaactggtacatacagagatgatagttaagttttcttgtttgaaatttattgttatatcacagacataaaagtttgcaagttgattatcacgattatgccttggaaaaatattatttgaaatgatttctattgaagaattataaataatagctgttcgatgttgaacagattgaatcgcaattttgaaatcgaaattggataataattgttgaattgaagataattcagttgattgatctagatcaaattctgtaagacacataatttgaatttttttattttttgcataatttaaaatatgaattgatttagaaggactagttgccttctgaatattgaaatttaaaatttttaacttattcattatgatattttatattttttttaatatttttatattttattgaacttgaagaattaaatgaattatacttgggagtctaaatccatttgagatttctttttttcaagtttctcttttctttctaatgccatttctatttttttagcatctaataatgtaccagttgctacactcttaccttgtttagaagattttactaatgttctgacatttctaggttgagttggagtttttggcatacttcttgaagtttcagcatgcttagtttcaacaaccatatcttctatctcttcatcactatggatgttttcaccttcatttggaatttctggatcatccacatttgccaatacttggaaaggattgaccacattatcaacgttactgactattgatgatgatgaatctgacctagataagttcttaggtttagatggaatagagaagccatctgaatctactttgtcattattgataacaacagctgcatctttttttttacattaatttcattaaaatatacaattttatacagattgattacttctacgcatatattattcatgcttcatcaattcaatatatcttcatatactgaactaaatgtaaattatttctgtttgattattctcaatcttttccatctaatttagatctaataagaactaaatttttcatatttgaataacaaatatgtatgcttttttttttccagtcaacttctgtattactataaatttataaaagatactataaatatttttctctaaaataaattctatataataaaacattcagtccggttaagggaaaggaaaatcctataaaacccttttgttatattgtaaaattaaatgaaaaatgaaaaagaacttaaagattaaatgaactgatagagcttgtagtttaagctttgttttgaaaaagaactataataaaaggttaaattgttaattattatatgtggttagtttgtaaaagaaaagtgtgaagtgtggaaacctaagaataagatggaagccttaccagtatctgaaatcccagtaagtatcttctataatattttcattttcccattgtaatatttcaggtctcttggcataagctaccctatgacaatagacaagaaatttaatgaaattattagtcaacgttgaaattcttagtataaataaaacgaagaatttcaaggtttgttaatctaaaagtttcaccatagtcaacaccctgaatttgtttgaatccttgagcaaccaaacgacctttaaacattggtggagttgtattatctttaatattaaaaacccaacgacaaccaattgcccttttgtgtgcaggtagttccactaactcccaagtatgatttgcttgatgagcttccaattctttcttaattgcaaccttccaaaaattaacatcaggtgaatccatagcttgcttataagttgtaggaataaattctgtaacggaaggtgtagaagcttctttaataactttaaaaatggcaccaagaaatttttcaactctttttggaggtggacccttggtatctgtaacagcagaaattgttctgactaatggagaagaggaacttgcatcagcaagttgattaattatttccagatctgtttgtaattcagcattaattggaggattatcagcaatttcagaataaatatcatcaatataatcaagatcgactcctgcttgatcaaaacccaatctagagatagtggatgcttgtctagattgtgcagcaggcgaagcgacagatggaaaattaccagatggaacaccagaagaagtaacagatggaacattaacgtgtgaagtaacaacagatggagcagcaacagatgacacaacagatggagcagcaaaggaaacagccgaaggaacaacagatgaagcaacagaaggagcaacagaaggaacaaccgaaggaacaacagaaggaccaacagaaggaacaacagaagaaacaccagaatgatcaacaatagaggacataacagaagcgtccgaatggataccagaggaggcaatagatggagtttcatattgaatatcactgttcatattataatcattatttgaaacatcagttgaattattgacctgagaattagtattattaatttcaataggtgaagaatgaacagatgcaatagatggtgaggatctaacttcagaagtattccatctggttgatttagatgtagtattaggagcatcagatggaacatagcttgaatctgtaatattaaccgaagtatcagcagcaaaaggtagtactgcaccaccagttttagcaccaaaattaacatcagaaggtggtaaagtattggacattggtaattttgcaaatttcttatatggaaataatgtatcattaaacttaacgttattggagataaccacgtcttttaaggaaggaataaagcatctgtacgctttgtgaactgtgctaaaaccaactaaaataccagaaactgaaacaggagcaaatgaagaaattcttttctcaggaggaactaaaacataacaagcagcaccaaagggatgaataatgttataatttggtttgtagccataccatctttcaaaaggagatttaccattgagattatcagcaggatatctattgattaaaaattcagcagttttaacagcttcagaccagaatgtttcaggtaaaccagaggagaacagcaaagtgcgaactttttcttggatagttctatgttttctttcagcaacaccattttgagatgaattataaggaacagtcaactgatgagtaatccctttttcagcacaataagcatccatttcatcattgcaaaattcaccaccattatcagttcttaaaattgcagctttatatccttgggcagcaaagaaattttcagcagtttgaataaaggacttgattaaattagtaacatttgatttcttttgaattggaacaacatgagtccatcttgaataatcatccacgatagttaagaaaaatttttcatcattagtacctttaactggaaatgaaccacaaacatcagcatgaatcaattgaagtggagcacttgctggaggagtagttgaggatttgggataaacttttgtcatcttaccagaagcacatgagacacaattttcaacagaaggaccacctgaataacctattgatttcaaaattgcaggtgatggatggcctaatttagagtgcattagttcaacattagtagatttgactgcaaatgttctagcaacaactggaatatagtccgaaaaatataatgaaccttcagcagaaccaatttgtacattttcatcagtaccatttggaataaactcaactttgtgtttggaaaatttaaaatcaccaaaatgagatgcttgtctaatagataaaatgttttgtgttgcatcaggaacgtaatgaacatcagataaagtaatttcatgaccagttgaaggatgaactaatttgattttaccgattcctttaacttccaattgagtgtcgttaataccagaaacatgaccaccaattgtttcaaattcaaaaaaatggttcttattaacagtaatattgatatcagaaccagtatctaacaaatatttatcagacatagtgagattaacagtagtagccatccatgcaaaaccattggaagtagaggtagtaaaggctgaagcacccctttttgaagatgtagctgatgcgggagcaggagctgtacagtctctagcataatgacctgtaacttgacatctaagacatgtgatttcatcaggagttcttttgaaatttctcttacctttatttttattgtttttaatcataaaggtctgagcaacagttggactaaaatcatcaagtgctgcttcaacagctgatagtgataaatcaggtgcagcacaatctaaaactttggctttggctaaaggagagttaaacattttcagataaaataaacccatcatttgattaatttcaggagtattgttaaattgataacaaacatttttgaaaatggctaaagcttcaccaggagaagaacccttagttctagcatcaacagcagaatcaacaagattggaaagttctctaacagatatgtgtgaatatcttcttttaattaaaacaagtagctcaaacccaacagcagcatccgtttcaaacttatccaggatagatggagcaacagtacaatttaaaattgtttggataattagggttaaaaggttttggatttgagcactttgaacttcagtagtgtcaggagttaacatcaaatctcctgaaacaaaatagacatcaacacctgcaccaacagtggccaacattctgccaacatagttttcccatttcggataattaacagcagcagatagttttggagagctatcttttgggaatagagtcgagatttgacccataacctgttgtaatctacttactctagatgaggcgtccataataaacaacagtaatagttagttaaataaactaaataaaatataaataaatatataaactaaaaaacaacataaaagaaatattaacaaccttggaattcttcgttttatttatactaagaattccaacgttgactaataatttcttttctgatttgcgagcaatactaaaattcaattggttcttcgaggctcaacttaataatataatattactatttattattcagtctcgcatagacttaccaatctcaacaatgtctaattggcttcccattgaataataggccacatagacagctactgtaaaaatgtattgtttagcaatccggtgttaagtgcatataagtagtagtaatcttggggtttgttttttttttgttttttacattaatttcattaaaatatacaattttatacagattgattacttatacgcatatattattcatgcttcatcaattcaatatatcttcatatactgaactaaatgtaaattatttctattagttcattctttaacctttttcttctaatttagatctaataagaactaaatttttcatatttgaataacaaatatgtatctttaataaatctattgttaatcctaaactctggatcattcttcttgcttttgtagcattgtttgttgaagaatataattaacttgattattatatttgccttataagcatctttctttgttgatattaaaccaacaatattctttagatcaatttttatctctaattcttttagaattacttcaattcctttacagttgaaaaagacatgatgagtcccatcttccccttcgcagaattggcaagggtgataaaaatgggaattcaacattcctgtttgtaattcaaataattcattataatcaacatggttttgattggtgattctacccaaccaaccaaagcatgcttcccaatccaattggttttctattttaccatcccaataatctgaattaaatttatccttaaattcttctttgtaaaatctttttgaaaaatgtttaaatgattcaatattgatttcctgatttttattgaaaatttctacaattttccatttttgaacatttttttccaccattgaaaataaagatgttggattgaaatctgtagtttctttaacctgaaaatctgagtgaatatcagtcaaataataccatcctcgcaaatatgggaaaatattagagtacaccattaatggtgctaatgtttttgaagaagcttcatccatgttgtaatttacagggtgttcgataatgaaattgatatttggttcaagatcgattattattttccctgtatttacatttattattttaggttttgcaacctttaacatttcatttgaaagagtttcttcaatggtaatatatcttccccatattttatgatttttatgcagaagaagattgaacggatatgttgaaattaatccattggaaatagtacctggtatttttatttttggtaagtttccaggtacagctctatttgatagtatgtaattttcaacatatttgtaataacaatgataaccgtagtgatttctgatcataacattaataattccttgtaatgagtgtgagattattaatgtcaaaggatgctcatttataaattttaacttctgtttaatagtcgttatataaatgaaatatgctcttttaccttgaagctgtttaccaaggtcaatcagacccatacccccatttttgtgaggttgatgccatttgattcttctaactgcaattttcagcggtaaatatttaactaattcttttttaacatgattttcaaaagaattcaaaagaggatccggaactggatcatgttggtcaaaataatagatagtggaataaatgtaagtattaacagctactactctttgatataaatttagatctaaaaacatagttttccttagtcttgttttcaattggtttattttattgtaccagttgattttcaacaaggggattcctagatagataggattttctttgatatctaaaattgatagcttcaattgatttatattagcaaattgtttgatattattgatacctttattattaataaaaattattgatttcttttcatttattttaagatccaaaattcgagcaaaattatttaaaattgatattggttttaatagtctagtaataatatatgatgttcattggataatgacggtgatgaattgatttgattagcaagaatccttgcagtttcaatatgtaaatgaatatttctgtgaagcataaatgcttgttgatgatgggaaataatcctgtttgcaataggcattattctattagaaatagaaaagttgattaatctaagtgatgaatttgtaagactgataggacgtagatcatctattaatggaagatcttgtcggtaactctttttgggaattaattttatcaatactttaccaatcttatcagttgtggttaaattgccttgaagaatataatttgccatgttggttagaatcacagcagcagaaacccagttgttttttcaatctctgtaagtaataccatcagtccctggtgattatggaccattttcatttagccttagaaggtttttatatatctcttgttttgaaaaaggtttaattaaatcatttttctctttctcagttaattgttctttaatattttcagtgaacttgtcaaatttgttatttaaattttgatttgaataaatttcatttgatgcgaaaagatttgaataaaatgaatttgcatcatttataatattttcatccaaatttgcttcatttgaatgttttccaaatctaagtctaagtctcttgaagttttttgagagattagctgagatattattgaattgaggatcattaaaatcaaatcttaattctttagatgatattttttccttatatgaaggtaaatgtttcattatttgaattactttatttgttttccagcaaactctttgcatatatgcattataatccattgatgggtttttagtatccagaatctcattggtgaaaatgtatttatataattgtttattttcaataatgtaatctattaaaaattgtgtatacaagaaatccgtactaatctagttacttctattataaagtattttatataaaatacataccagatataatgaattatatcttaagtgaaaaacttttcacttgaactttctcgacatttatgaatgtctcattatgtacatgaatgcacttcgcggcacttcatgggccacttccttgcatttgtgagatcgtgaaatatacgattcacagtcctatcgacttatgaggaattcccctcattttaataatgaacataccacatgtttttatacttattctaatactttctttacttctatttagacttactctttataacgaacttaactattacataacttattacccttaatatttttcccttataaatttgcgtatctgtacatccggaatttataaaaaatattttttataagatttaatagaattaaagaaaacaaaagaaaacccaaattagaaaattttagaaacaatgtccaacaacaacaacaaaaacaacaaggaagcaaaggaaactaaggcagttaccgctgttgcaaaccctaatgatgaagtcatgaaaatgcttatgcaaattaattcaacaatttcaaatttacaaaaagatgttgctgaattaaagaagaaagaagaagttttagaacatgaagttgaagtcgagaaaaagagagatgaagaagaagttactgaaatcttaaaagaagaagctgaaattgctaaggaagaagaggtcatcaaagatcttaacaccaaggcagaatatctcaatgaacaagaaactaaacttgagactgaagttgcaaatttagaaactgctttaaacgaaaaggcggttaccaaagaagaagttcaagaagaatttaaggaatttgctaacaccatgaaattagaggttgctaatcaaattgtcaatgcattgaaatcaatgaacatcggcaagattcctgttcctgatgaaaaggatatgattttagaaaagatcaagcattatttaccagatgtttatttaactgacaaattgattcatgaagcaaaaggtcaagccaaggaagaaattcaaagaacctcgtttattagaactatcggtgagagcaagtttgaacagtcagactcagacaagaagagattagaaaaggtcattaagattcaaacttatcttattaattatggtaattcaatcaatgacaatttagaatcattacctggttatgctttaagcagagaattattatctaggtataaagggaactcatacaatgcccttttaagttttgcttttcaagactttgactttaagagttatgccgacgaattggcttcgaaagtttataatttcgttgataatttgaacgacattagatctagaaacggaaatcttactttacaaagatttttcaatgattggttagcattagctgagaaggcatctttcatgggtgcaagtgctgtttatgtcattaagattgctttacaggaagcggttagaaaaacaaaattttatttacctgatcaatattatggttcaccattacgatcaattagtgatttttcagaagcttttggtaacgaagaacgaaaatttttcaaacaatattacaaagaatatgcaacatgatgattacatttttacaaaaaaaaatttttttcaaaagatatttttatttacaatttacttatttcatttaattacaattattattttattattacgaattacaattattattttattattacaaattacagttattattttattattaccaattttcttttgttgaataggttgaaaacatattggttacactctcgtttcgaagaagggagtattgtgagatcgtgaaatatacgattcacagtcctatcgacttatgaggaattcccctcattttaataatgaacataccacatgtttttatacttattctaatactttctttacttctatttagacttactctttataacgaacttaactattacataacttattacccttaatatttttcccttataaatttgcgtatctgtacatccggaatttatacattccaccagctcagtaaaccgtccggtctattcagtacctctgacctggaccactactttcgatatgatcaggaattgatggtattcttttgtaaaaattatctttattaattatattattattagaatttgaattgatatctgataatgtacatactaccggtctatgtgttgtaaacggtagcttttgatgtactctatatttaaaattgatatttcttagcagattgaaggaaacatggaggatgacgtaatactaaaaaaatatttataaattttgacgcatttttttggcataacagctcttatggccaagttggtaaggcgctacactagtaatgtagcgatcctcagttcgactctgagtgagagcacttgttatactcagcgcaagtggtttagtggtaaaattcaacgttgccatcgttgagcccctggttcgattcctggcttgcgcagttttatttccgagatagtttagtggctagaatttccgcttgtcacgcgggagaccggggttcaattccccgtctcggagtttttttattttatatttcttttatgagtttgatagtagaaaaaattattcttgattcaattttttataataggaatcatcgatgttttataatcttttcccttttttttccttttgaattgattagctgaaagcccttctattattaacgataataaaatttaaaagtgaattaaccatcagacgttattagatttcctctcggtttatgaacgatgtctaactctaatttgaatcctatggctgaaacagtcaacaaaccacaaacactgaaaccttcaaaaggtattttcaccaaaactataagtcaattacccaaatcattatttacatctaacaatgtctctattaattcgaaacgtagaaatatgcctttaacatttttaccaccaagcactaactctccactttttgtttataatactaattctgatcaacgatctttcctgagtttatgttcaggttctaatattgatgtttatgaagatataggatctgagaatgttagaaatgataatgaatctgtttcaacttttagatcattaccatcaacactggaagggaatgatgatgaaattgaaagcattcatcaatggcttgatgatgaaagagaaagaaggagtttgatcaataatgaagaaaatacagaattttatggtacaacaaatgtatcagatgaagatattatggtacgagccaataaattgtaccctgatgaagatcattttagtagaaaatcttccattattagtatcgaaggaatattaaaagatgaagaagaggaagattttttaaacgaaattacaactacaagaaaggaagtacataaattattcagttactgtttaccattgactattacattctttttagaacaaatattttctttagtttgtgttatatttgcaggacgtttaggtaaagaagaattagctgcagtttcaatgtcatctatgacgtctacaattgtatttgctatatttgaaggtatagcaacatcattagatacattatgtccacaagcttatggtgcaggtcagtatatgcatgttggaattcacacccaaagatgtattctattttctttagctgtgtttatacctgcttcaatggtttggtattttagtggttatcttttatcatttattataacagatgaaaaagtcataatattaacacaacaatttttaagaattcttatattagcaggtccaccatatatttgttttgaaaatggtaaaagatttctacaagctcaaggaatttttgatgcaggtacttatattttatttattacagcaccgataaatgttttcttaaattggcttttgatatactcagatacttttggtgtcggtttcataggggcaccaattgcctctgttataaatttctgggcaatgtttttattattagtattgtacgtcgtttacgttgatggtttatcatgttggggaggatttacattggaagctttaaatcattggtatgatttatctaaacttgcaattccaggtattgttatgattttagctgaatatcttgcatatgaaattctcacattatttgcatccaaattaggtacatcagcattagcttgtcaatctgcactatcatcagttgtttcattattatttatgttcccattctcttcttcagttgcatcttcaactagaattgcaaactttgttggtgctgaaaatattaatggtgctaaaattgcaatcaatgttggatttttatcagctattgttattggtttaataaatttttcattcattcattttggtgcagaatatattgcattactatttaccaatgacgaagaagttatctcaatgtttatcaaattatgtccattagtttctatttttttgatattcgatgcaatatcatgtgttgctaatggtgttatgagagctttggcaaaacaacttataggtggtacattaagtttagtaggttattacgttattgcacttccattagcagtatttttatgctttaatatggatttagagttactaggtttatggataggaaatggaactggattacttttgattgcatgtactgaagttttcattatttataatgttaactggaaaaatattattcaggatgctaaggaaatatctaaaataaattctgatgtataatgtctgatgtataatgatttaaaaacatgtatacttttatagaaataatcgtaataacaatcattattatattattataatcatgaagacatatgtgtaaacaataccagccatttggaagtggttgaggagttgaagatgaaaatcaaaataaattacccgattaggaaaccagccacttcatgaaatttgtttgcgaggcttgtcactttatgcaagtaagctgttgacgttttacttcttttgttcgtttgtttacatgtgccctgttattcttgatcagtgtagatcagccctctgatttcgagtatcgtcaatcatgacagccaaactgtttttatttctgtataaaaggtagacgagatattaagtttttcgtctattgaaattatttggtactctcaaattaaattaaattgaattaaattagttcagttaaattagttttaatatatcattaattaattcattaaacaaaactaacatataaataaaaatatcaaaatgaaattaaatatcttactacttttggcctcttgcatgagcctttcaaaagctgaaaatgcttatgttcctggtgataacttctcaactttcacaccaacagggggatttgcatctggtgcaacacttgattatactgcatcatttggtattgcaattaaaccaattgtctcatctgttgcattatcatcagtaacaacaggagaacaaggtcaagctgttgtcactcaaataggagacggtcaaattcaagcaactacttcaactccacctccaactttaattacacaaattggtgatggtcaaattcaagctacacaggcaatagaacaaacaactgcacctgtagtaacacaaattggtgatggtcaaattcaagcaactactttaactactattacaagatcaactacttctactaattcagaaacatctaatgatactgatggtgttgtcactacaaaagtcactaaaattgttaaacaatttgttactgttccatactcatcaaccgaatcttcaacagcttcttcaactgcagaatcatcttcatcatcagatgatatcaccacatatataactgtcactccaactgaaacagtacttgcaacagttacaacacctaatcttccaactttagatcctactacagtcattgttgaaaaacgtcttgttgaagaaactgctactgtctttttaaataaacgtgatgttccacaatcatgttctagtgaatctgcacttacaatgactcttgaaaactctgtcttacgtgatgctaagggaagaattggtgctattgtttctaacagacaatttcaatttgatggtccaccaccacaagctggctcaatctatgctgcaggttggagtatcgttgatggtaaattagctttaggtacaagtactacattctatcaatgtttatcaggtgacttctacaatttatatgatcaaagtattggtttacaatgtgttgcagttgaattagacattgttgaatttcgtgattgttaattttattgatttaaatatagttgaatccccataattgttattattgaattagacaaatctattcacagcccccatttcttgtcaattctttatccaacaaatccaaacacagccgaactaaaaattctctatattctttcttatataaaacattttatttacaatacttttctagcttttttataactgttatttgatttctttcattatattaacaatttaattaaaacgatataaagtaatatcatatacacgttttaggtttattataataatctactaatgtactttttaaatttgtaaacaatttataaattagtttctcttcttaaagtttttcttccccttacctttactgtttttctttgaagaagatttattgattctctttatatcattttcatgtctatctttactggttttcttataactacgtgaagaatcaccggcatcttctaaagcttcttctctctttcttttcttactgttcattttctttttagttttacctaatgcttcaaacactttatttttttcatccttcttttccttttcagtcataaaccaagttctttttggcctactttcaatttcttccttatacttcaacatattttcacctttctttaattccatttcagcagctaaaacagccttttcttgtttttcttcatcaataatttcttgaattaaatcatttttactctcaaggattttatttacacgatcaacttcatcccaatcagcattacgacctaaagctttaccagttttactttcttcaacatttttaataacttctctaacaatagcacgctctcttttagcctctccaacaaaacttatagatataccttctcttccagctctggcagttctaccaactctatgtaaataaatttcatgggtttttggcatatcaaaattaataacaacttcaatctttggaatatctaaacctctagcagctaaatctgtacataataaaatattaactgttgcctttttaaataatgtaacactggacaatctttgttcttgtgataaaccaccatgtaattcaccaactctcatacctaacaaaccaagtttaattcttaatttatgacacatatcctttgtactaacaaaaacaataattctttgcttttgatcaagttttgataaaatactatataataaagcaggtttagattcttctctttttctaactctaacaaattcttgtaccaacccactagctgctgtcttaggtggatcaatcataatacgaacaggtttatctaatgaccatgcaattaattgtttaattgaagaattcatagttgcagagaaaagcattgtttgtctttttcttggtaataattcaacaatctcttgcatttccttttcgaaaccttcttcaagcatacgatcagcttcatccataacgacaatttcaacactatcaacagagaaagaaggtgaatttctaatatgatcaatcaatctaccaggagttgcaatgacaatgtcaggacgtttctttaattcttgttcttgttgtcttaaattcaaaccaccaacagctaaaccaatagttaaatttccaatatattgtgcaagttttctaccaacatcagcaacttgaattgctaattctcttgtcggtgctaaaactataactcttgttttagcaacttttgaaggtttatataataatctttcaataattggaatcatataagcagcagttttaccagaaccagtaacggcacctgcaacaatatctctacccaaaagagcaattggaattgatgcagattgaattggagttggtttactataattaagagctgtaagtgatttaataattggacgagacaattgaagtgattggaaagttttatgaacttgttctcttgctgcatcaccttcattttcatcataatattctgccatagcttcagcggaatcttgttccttttcatcttcagatatgttatcatcattctttaaaactaatttacgtttttcatcatcatcatcatcaagatcatcatcagattcatttgcatcaccattttcttcttcattttctttcttttcttcatcttccttagctggttctgcacccattccaaaaccatccattgctaattcatcatcatctaattcgacatcatcatcactagcattttcttcttcttcttcttcctcctcctcatcattatcttttgcttcatcttcttcctcatcatcatcatcgtcttcattatcagacccagaagctaaatcatcatcatcattgtcattatcattatttttactattatcttttatatcaatacgaccagttaaaccaccctttcttctaataatatcatctaaatcaacatctttcttaatatcatccttattgttattactattaacatcaaaattccaaccatcaaaggcatcagttgaacctaaatcttcaactgaaaaaatataatcaggatttaaatcttttgaaactttaacttcattattattttcaatttcttcatcagaatcaatttcactatcattagaatctttctttttacctttcttatttgatttttttaatttctttgatttattcttttcattatcattttttgttaattctttatcagaatttttatctttattatcaatttcttcttctgaatctaaatctggaacatcagattcagaatcggaaattgtcggtataaaatccaaattaaacttagagctagcctttttattactagtgtttcttttagtagtaacacccatattgaattgcttattagttcttaatatatcaattgaaataataattatttattaaaggaaaagtgtttaacttataaaaattttttttgtcacagtgacatgaaaaattaaaaaaatatttcgcaacttttcatacagagagaaatttgttgtaacggttttaatgttctataattctataaatcgatatatgtaaatgatatgtaaatgatttattatactactaatcataaaagaaattaacactgagtgaactcatatcaattttattattagtattatctgcgtttttatcattattactattatcaatgttaatttcatcatcagtaaaatctaacatttgtgtacgaactctaatatcttctaatgttctaatatgttttctaactgtactaccaactccactatttgcaaaaaattcttctgaaattgatagtttcatctctgcattctcaatattaacaatgttatcagatttaatattattatcaattttactatcagcaactaatatacgtaaaccatcaacccaaatatcttttaattgttttgtatcaacataaaatgtaaatataccagttttagtaacaacatcaattctattaacattcattctttcactttgaatactaattaaacctgtatcatcattattttcatttaaattttcagatataatattaataatatttcgaaattcaataaatataccatctttatctaaatttggagtttgattatttttaactggttttttattaaattccttgtaaacaatactttgagaatttgaatttaatgtaagataataataagttttatcaattgaatctaatggattattaacataaacccatgaacctttacttaattgtgaaaatctttgatcacgaattaatgcaataacttgattatgaattaaattttctaaaggtttaatttcatttgaccacataattgatctctttaattcaatattctttaattgtaattttttaattttatcataattaaaattatcaactatttctaataatgaagatacatcataatctttatcaataacagataatttagaagataaccaatcaatgactacttcaaccatattaataactttatcagtatcattattttcaattttagcaccactaaataaccaacaacgagtaccaacatttaataaactaaaccataaatctatattccaaataccgaaaatttgatttaaattattatttttaataatatatgaactaattgatgaaataaattttaatattgggaaagttgaagtcatattacattcaactaaaattttctttaatgatctctttggttgttttaaagtaccaattaatgataaaattgataaaagttcaatttgattattaatatcatttgaataatttaatgtaataccaacttcttttgataaattacaacattcaatccaaataaaattattttcatcaaattttttatttgataaccatttaaaagttaaatctaaactacctcttaaaccagtcataccttcaatttcatcaattcctttaataaatgataatgaaccgaaaaaattattaattgaaagtgaacgtaaaacattaaataaccattgttcctctaatactaaagattttgtatcattaattgttgaaccaatagtttccattaatctatataatactttagcaataaaatcaacaatatttaaattcattctagcatctgcaaacgtaattcttgaagataaatttgaaaataacacatcacaccttatcttactactattattattattattattagaattattattggttattggttcacataatacacttaataaagttttaaacataccctgtttcctagttttaggaataacaccagctaaataagttaaacaaattcttaaaataccacgtaatacttcaacaggtaaattatcaataaataataaatcaaataatgatctaaataatgaagcatcaaatagggagaataatttatctgattttggaacataatctaaagttttagtgaaaatgataatttcatttaataatttggatgataatattgtatcatttgttataatattatttgatgaaattaatttaattagatcatcccttaatgaagagatatataaaattgctgtttgttcatctaattgtgttgaagcaattggaccttgtgggggattagacagtttcaactgtttgagatgtttatgtatagtactataatctacagacattgcctacaagaagaagaaagaagaaagaagagatattataatatatttgtgtccctcacaatttttactcaaagctttattttattttatacaacgacactttcaagtatcttatcaattgtgcctgcacttacttcaatgtccttgatcttatcattgaagaagttaaggtctctacgtatctgttgaaccatctcatctttagttccattggtttgttcattatctagtatttcattgtatttcttaactaatactatgacatattgttcaaatatacgtttcataacattatcgtattcttcccttggtaaatacctttgaacacttcttgcaattgttaatgtatttttaactattagatccatataggaattgacttttagttttaattctttgtgtttgatcgtttctatagcgtctttagtgtcttcagtgtcttctttggtgcttacttctttggtttcttcaccttcttcggattctatttctttagtttcagcttcttcggattctacttctttggtttcaccttcttcaataccttccgatttatctacactgtctttcttactctcttccccttcctcctcaatatcttccacatcttcatctctattaacaaattcttcaacattaatcctatttaaaacagatccaacagtatctctcattatactaactaatttatcataaagatcaaccacttgatccttaaataattctttaacttcatcaaattctttaattatatttttcctaacattaattataatttctgaattattattattattattattattattatcaatttcagaaagacaaactctactaatatcattaactaaaatactccaaaatctacaaacttcacatgcaaatgctaaatgttttgtagttatatgttttaaacctgcagttttcgatgcttgtgcacctaaaattgattgatgaatctttaaattaattgcctttaataattcaggtaaataattttgtgaaattatattatttatcttattcttaaataaatgaattaataataaatatgctttaattgtaattaatatgatacccatcgatgatggtaaaatataattttgtgaatgtaatgtaagtgatttccttaattcggtagtattttccttatccttttcttcgttttccgtttcttcttttttattaatattattaaaatcaattgataatcctttagtccattcattataatcaaaatcaccatttgatgcattaattattaaatctaatatattttgtgtattaattggtaatccttcatctttccaaatttctaattcaattaattgaattgattttttaagagattttttatgaaattgttgaataaaattaaataattgtttattattaatttcttttaaaattgattcattaatcataccatttgataaaatttcacattgatttaaaaaattaacatttaatttatataatctaataaaataatttaatggaatttgacaattttgtaattccctaattttaaataattttgcaattcttctttgaattgaattaattgttaaactaattgaatttgttaaatctaaatcattaattatatcaggttgaattttcaaaatttgggaatcaaaattatttaaaacatcaattgaaattgttaataataaatttttttgaattattaatcttctaaatgattggaaaaatttagtataattatttataatcattaattcaaattcctttggagtcaaatttttaactaaatcacttaacattaatgcattacttatattatttgtaatattactctttgattttgaatcttcactaatattatcattagtatcatcaccaatatcattttcttcattgttattgttattttctgatggtaaatttgatttaaaaattgattttaattcatttgagaatctttcttcatataatttgaaggccgaagataattcaccacatctagttaaacctttaagataaatttctaaatttgatttaaattcatcattaatttcaagataaattttatcatcatcatcattagtattattattactactattttcatttgatattaatttatttaaaactaaatcttcatttaaattttcataaacattacgtaaatcatcaattaaataattggaaaataattttgcataagatttaccagtatctgatattaaatttgataataatcttttcaatggtaataaagcaggtaatttatttaaatctttcaaagggtatttccaatttaatacaattttatcaataagtggatgatttggaacattacctcttataagagcgaaaactgaatcaattaattgtaaagaaatttcataattaccattataataatttgattcagctaaatcagcttgaattaaaatcgtctttatctgtaataataattgtttaaatttttcaatattttgatattttgtaattaaattaattaaatttttagaattttcaattttattttcattaaaagtatctaaattattattaaattttattaatttatttgataataaattggaaacattatttatatttttcaaatcatccaaggctgaaaaaaatttatcacttgattttgaaatttcattaattaaatgaatttcaattatatctaaattagaggataatttttcctgtaataaatcatgatcaacaattgtattagtaccattagtaccatcatcatcaataagtgaagaaaatttagtaccatttataactttattaaatattttaggattatctaatctaaaatcatcatcgaaataaaaatctggtatatttgataaattattgaaatccaacattgcctcttgttcctcatttaatggattaagattatcaccactactattattactatttaacttatttaaagatgaataagttaaagattttgaagattggaaatcatcaaataaatcatcaattgattcaatataattaataaattgatcaatttcaatattatttggtaattgagataatttaattgaaggtatatctttaattgttggaccattaagtgaaataactgttgaagttgaattaattgaaagtaaccccgttgttgttgattttaatttataattaacatttgaaatcaattcatggatattattattataatcataattataattataattgtaattagacttctccaaaagagagtcctcctcccttagagatgatacagttatacagttactatctatatcattcattactgttactgttactctccctaccaagagaaagcagtacagatgataataaagacgaaggcaaaaaagtgaaggctcatcgacgccacccaaaatgaaaatgcctaagaaatgaaaaagaaaattcgagaaacttaacatttaactagtgacgtgtcttacttattaaatttgacacgacatcaaccatttggaaacttgtttatatttaaatgaagggcgttttctcttatttactttatttcttctttctgtcttctctttcatcaaagatagtaagtatataacaatgaggaaatctccattctcaattactgcatttttcctatatgcagttctattatttattttaccattcgtttctcaaaatttagctcatgctgatactgaaaattatggtacagttattggtatcgatttaggtacaacttattcctgtgttggtgttatgaaaaatggtagagttgaaattttagcaaatgatcaaggtaatagaattactccttcttatgttgcattcacggataataatgaaagattagttggtgattcagctaaaaatcaagctgcttcaaatccttataatacaattttcgatattaaaagattaattggtcaaagatttagtgataaaattattaaaaaggaaattaaacatttaccttataaaattattgataaaaatgatagaccaattgttgaagttaaatataatggtgaagaaaaacaatttactgctgaagaaatttctgcaatgattttaggtaaaatgaaatcaattgctgaagattatttaggtaaatcagttactcatgcggttgttaccgttcctgcttattttaatgatgctcaaagacaagcaactaaagatgcaggtacaattgcaggtttaacaattttaagaattgttaatgaaccaacagctgctgcaattgcttatggtttagataaaggtgatgaagaaaagcaaattattgtctatgatttaggtggtggtactttcgatgtttcacttctttcaattgcaagtggtgctttcgaagttttagcaacttctggtgatactcatttaggtggtgaagatttcgattatagagttgttagacattttattaaaatttttaaaaagaaaaataatattgatattagtgacaatccaaaagctttagctaaattaaagagagaagttgaaaaggcaaagagaactttatcaaatcaaatgtcaactagaattgaaattgattcatttactgatggtattgattttagtgaaactttaactagagctaaatttgaagaattaaatatggaattatttaagaaaactttaaaacctgttcaacaagttttagatgatgctaaagttaaaattaatgaaattgatgatattgtccttgttggtggttcaactagaattccaaaagttcaagaattattagaaaaattctttaatggtaaaaaaatttctaaaggtattaaccctgatgaagctgttgcttatggtgcagcagttcaagcaggtgttttatcaggtgaagaaggtgttgaagatattgttttaattgatgttaatcctttaactctgggtattgaaacaactggtggtgttatgacaactttaattaaaagaaatacaccaattccaacgaaaaaatcacaaattttttcaactgcagttgataatcaaaatgctgttttaattcaaatttatgaaggtgaaagagcaatggttaaagataataatttattaggacaatttgaattaactggtataccaccagctccaagaggtgttccacaaattgaagttacatttacattagattctaatggtattttaaaagtttctgcattagataaaggttcaggtaaatctaattcaattacaatttctaatgataaatcaagattaactcaagaagatattgatagaatggttgaagaaggtgaaaaatatgctgaacaagatgaagaattaaagaaaacaattttagcaaagaatgaattagagaatcaagcaattagtttaaaaaatcaaattaatgatgaagaaagttggggtgcaaaattaagtgatgatgataaagaaactttattagaagcagttgaagaagcattaaattttgttgaagaaaatggtgaaactgcatcattagatgaatttgaaactgaaaaggataaattattaaaaattgttaatccaattgtttctaaattatatgctaatggagattcaccaattaatgatgaatttgaagatgaagatgaagatgatgaagatgactgggatcatgatgaattgtaatctaaatcaaatatttaaataaaataatataaaattcttgtgtattaaactaaattaattaaatctattatgatatttattacataatcacatagtaaaaatttcttttttctgttaggattcctatacatgaacatgctgatgctatactaaatttatatcgtggggcattattgttattctttcttgttgaataaatacaatggagaatcagaatacagaggaagggataatgcttcgattgaagaaacagaatcctacatttgatataccggatgaagaaataaattcacagataaataataataataataataataataataatgataataaacccacacaaaaggacattacaaagttacataaaaagataacatcaattaatgtttatgaaattttagataatttaaataaaattaaatcattaagtgaaattaatggtactatatcaatggcaattttattatttttcattaatgaattaatttggcttagtgaaaaattagaaaatggtgaaataaataataaagaaataactgatatagtatttggtaatgaattatggaaaaatataataaatgataataatattaataataataatagtaaagaagaatatgatgacataaaagaaacacttgataataatacttggtaaaacaattgaaatttgcaaacctatatttgaggaaataatagatagaaagcaaagattaaataataagaagaaaatggaaattatatcaaaatctcaagaggaactgggtatttcattaaggaaaagttctaaaattttttcaaattttgaagaatctaatgattcaataattgataatattgaaactaatgatattgaattatatgttagtgaaaaatttggtaaatatgagaaatgtttgaataatgatgaaacttatgaatggatttcaaggaaattttatttgaaaagtgctccaaatatggaaattataaaatatattgaaagaattaatacaaatttagaaattagtggacctgttggattatgtgctggatggtttttatttaaattagtatttaatattaaatgtaatgaaaaattaagtgatgcaatgaataataataataatgattatattaaatatgaggatagggatgataattattgggatacgagatcattcccattatcattaggtgaatcattcaatgttaatgggataaataatgaagaagaaggtaattcaattggaatgaatgataaagatgaatcatttaattctgttatatcagaagaagaggaagggtctataaataaggaaattaatttaatgaaagttaataaattaaatgcatttagattaatacttacatcaattagaatttcaagtaaattaattgaagataaaaattttagacaagaatattattgtaaagtaacaggattacaaaaattagaagatttatttagattagaattagcaatgggatatggacttgaatgggggttatttactaatgaatatacattatggagatatttatttcatatgcaatcaattgcaagaggatgtaaattattaagagatagattatgtaaatagttaatagttaatatgtaacagtaagataagataagagaaaccctgataaaagaataattttaaaattcgcactataaaaggaaacccatttcccagtttttttaatttaagttcttttcaactactgtttcttttaacaagtggaagatgtaatggtaattgtactgttattttaatcgtcctcttctcattgttaatatgtatttgtgtgtgattatatcctgatgaatttttgatatcttatatgttttttctggcatctctaatgttagagcaacaatttgttgttcaatgaatacaaattttgactcttatctgaaataatcacattcataatacttattgtagtttcttacttattaattatacaaagataaatacttattcttatttattatataatcatgcctttgtttgctaaaactaccaaatattataagcaatgcatttttaagtgaaatactagctaacctttatcattataattatagtttatcagctattgctgatactaccagttaactgatctttatcaacaatgattcatgtacaattcacttttgtatcataactacctttgatttcttaaaataattagattattaaatctatggagtccaaagtgcaccactattaccaccatctctacgtgaagcaaaactatcagctgtaataacagagttattttcagatttattggtcttttttgtattatcattattattcttagcaggattcttgtttctatttctattcttatttctatttctattcttatttctgttattatttctacccttattattatcatcattagacttcttttgttcagttgtatcaataaatgaaccagaatttggatcaaataataatttagatttattaccacctgaataattatcaaaatctttttgaatttcatttaatgttttaacatttaatccaaaacttttcaaccaaattgttgttgttgcatcttcacatataatatcccaattaattttaaattcatcaggtaaatgtttattttcaataaattgcttttgaatacatgatctaataaaatattttaatctaattggaacaattgcctttccatttgattcattatcaatagaattaccattattattattattattattagtattattattatcattatcataaaatccataactgttttcaatatcatcatttttcgacttcatcatattaaaagtacctggaatattattaccaaaaacaccaactaattttttcctattatcatgattaaattgaccctttgaagaaaatccattgattggctttggtaattcacttaatgatggtgttgatcttctataacctgatgcaattttccaatctggtccaatactatctttactctctaaaataaatgaaactaaatttggtaatgaatctttcttaactttagatgatgataatgatgatttctttgatttcattctattataactttcaaaatctgtataatcttcttcactttgatttaatcttctttgttcctctttgtattttttaattgcatcactaacattatcattctcttcctcatctcatcctcatcctcttcctcctcatcatcattcatcctcatcactaaatgaatttaattcattattatcaaattgaacacatgaaatttgattatcaataaatttaatactttctctagcattagctgaaattaaaggattgaaaactttctttaaaaaatctaattctcttaatgtatataatggaacataaaatacaatactataaagtttcttattagattcatcattacgttgatttttcaattgattattagttaaatctatccactgtttgattttcccaacacctccataaaccaaagcactcggatcaaggatgtaatgatatacatccatattctccatatccatctctgattatatatctctgatatatctctgatatgatattcaaagagaaataaaataagtagtcttggtgatgacatgaattttaatggaaatcgttgaaaatattattccattatagtgagaagtcttatttgtatatttcattcaatacttttatttctataaaactctataatatctatatctacaagatctacaagatctataatctatttacataattaatctatagtatcaaagaatgtatcggaagtactaaaagtttctatactagtatcaggtttaaatggccaataataatatacttcagaaagatccacaaattcctgttcagtaatcatactcatctttttatttaatgtttcaattggtattaaatcttttaaataatcttcagctcctggtcctaaaacgtgaagtttatcccttaaaatagcacctggggcacataataatttatgaattattaaatgtaattcatcatgaaatttaatattaaatttataacaatttgattgtaattcaattaaacaaatttcaccttcaacttcacttgttggtaatttaatataatcatctaattctgcaaataatctttgtgctttggcatttttcaatttatcactacatgcaattactttaatatctgaatataaatttgccataagtgaattagttcttctatgaattgaacccattggacctaaatattttaaaatttcatttggtgttgtccaagctaaaaatttaattccaccatatgaaaacattgatgttttaacttcattataatatatacaagttctcaaagcagttgaatttgtaactgaaacaaaatctccaataaatattaatgaattatttaatggttccctacgttgtaaataatatttagaaatttcttcatttgttggttcaggtaaatattttggttcaattaatttatccttcaatggttgagtaagtaaatttgccttaattgttgttgtaacattatttttcattatatgtacattagttaattcatcatcagtttccataattctatcccaaaatttagttgcacctttaccatcaggataaattaaatgatgttttggttttaataatttgttaagataatatgtcattggtgatactcgtacattataatcaattatatttaattcatttgttgattctccattagattttaaataatttttctttaattcaagtttatcaaatatttgatcataaatctctttactataatcccaatcttaaccctttgatagttttctgcagtagatgcatgaactgcatctctgacagtattatgagcagcataaaacttctgcatagtatctattcttgtcctctataataatattaaaacctatactttctagtgaaataaattcaagtgaaaaataaaataaaataattttccaacatgaaaatttactattagaataaatcaaaccgcggtatctacaccgattaataggttgaactgtctttataagagtagagtagagtaagagtagacgactagaggtacatactacataagaaacaatcacaatggctaaaattaaactacgtttgtcgaaaaaggacgatgaaaatccttcaaatgattcaattacaacatcaccttcaacttcaacaacaattaaattaaaacaaccaaagacaagtggtaaaacaactaaaaagactgaatcatcattcatcatcgactggatttttaccaaaaattaaattgaaaacttcatcaccaactataactccatcatctgatgatacatttgctaaaaaatcattgaaaactactaataatataacatctaattcaataccaactataaaatttaagacattagatcaatcattcaatcaaggaggaaataatgatatagataataataataataataataataataataataatgtaaggaaaaataaaaagaaaactccaactattaaagttaaaccagttaaattacctggtaatggatatgattctgaggatcctgataaggaggatgatccattaattgaggaaggtataataataagatttttacctgatgaaaatttaaatattgttagatcagctgttgaaaattcagagaggggtgataaacataataaagatattgatgatattgatttatcaaatatttcaattgtttggaaggataaaagacgtgcaattgtttatattgaagattcaatgtatgcaggtaaattaattaatttaccaacaatttcagaaattcataaaacaattgataaaaaaaatatttttaaaacaattgatatttcacaaatgttattaattgttaaaaaaatttataatgaaaatgaaatttttaatttaaaaattgataaagaatttggtgaaactttacctgatggtttaacacctccaatggaattttcaaaacaatcatttactaaaaaatatgaaaattcaattattcaaaatgttgaagatgaagttaatagattattaaaacttgatgaagaagctgaaagttcagttttcgaatttattgatacagaggaagaaaaaataataccaatgagtgtaatggaggcaaaggcaaagaataaacgtttaaagaaggagaagaaaagactacgtaaagaaagagaacgtcttcaaatggcaagtaataacaatgatagtataggtataagtattaatacaaatacaaatactaataatgatgatgagatggatattgatgatcaatttgaagatattgataatgaattagataaattaatggatgaaagtctgaatgatattgatgaagataataataataataataccaaacatgataataataataataataataataatcataataatgaagatgacgatgacgaagatgacgacgatgaagatgacgaggaagatgaagaggaggaggaagaagaaatagaaataggaaacgatgatggtcaacaaactaataatactacaaaacacagcgaagatgaagatgacgaagatgacgatgatgaatgatgacgatgatgatgaagatgatgaaaaaagtgaagctgctagacaatcaattagaaatggtggtgttaatactgatgaaccttcacaacataatgcattaatttatgaggaaatatttgaattagaatcaactatatcacaaaaggagaaagatttaattaaggcaattaatccaattatgaaaaatagaattaatgatgttataagtagattaaagcaagaattagaaatgaaaaaatcacttattattaatgaagatggagatggtgatcaagctgaaaatgaaaatgaaaatgaaaatgcggatgaggaagaggatgatgaagctaatgaccacaatgatgaagcaaatgaagaagaagaagaagaagatgttgaagacgatgaaggagaagatattgaagaagataatagtaaaaatgggaaagataaaaataatcaatctcaaaacgaagatgaagatgaagacgattatgatgatctattttagatcatttcaaatcctaattaattataggaataatttttaaaaagctttacatagtgtgtataaatataaaatgtgaatatgtatgtatattgataaaaacatagaaacatcccctaatgtttcttttcatttttcctaattaaaataattgccgtaatataattttctaaatcaatactttctgaattttcaaaaattttagcaagtaaataatcaggacaattaattttatttgattttaatgctttttgaaattcttcaaaatctaaaacatgatcattacctcttttatcatgataattaaatgaagtataacaacctttaacaaatttacacattttaacaaaacatcttaaatctaattcataatttaatgatgatgatgcaaatgtctttattattatttctaatgatttaaatgtgaatctagtttgtgatttatatggatcatataatgttgcacctaattgttcaattgaaattaaatcatttgaatttgttaaattttcgaaaatcttataaattttttcattatgaacattaatttgatcatcttcaaataaaatcaattgattaattaaattattgtaattattattattacttaaattcattgattccaaatcatcatttaattcgttatccacatcaattattggtattttagcatcaattattccatcattattagagtttttcaatgatcttttagatgatatttcatcactaagaattgatgcagatgaataaatatcagccttttcatgaaaagattcataatttttcctaggagataatcgtttaggtgaatgattttgaccttgatttccccacaaatgaatcatattgtaaactatcattatcatcataactataattatccctcctattcattgacaataatgaagagtttgaacttcttgaacttgatctattttgatgttcattattaatagaatttgtcattctattatttgtcatttgtggaggcattgatacatatcgtttttgatgtgaatgtcttgttgaattactcggtatagatgatgaagatgagttatttttagttctcataatattattattataatcataatttctttgatcattatatctatcatttggagatcgtgatacaattggtgaagaaggcatatgttgagacatatttggaggtggtggtggcatacttggcatatttggtgacattggaggattttgaacataatagtaattattaataatagtaggtttaggtttttcattaataggtacgggtattggtctatttatttgattataagcaaatgctaattgttgtggtgatagctcaccttgataatttcttgattggtgattaacagtttgaggatttggatgataattgcgtggttcaactaccttttcaggttgttttttagaacctgttgcagcttgtggttgtatagatttgggacttggtgcctaaaatagattttaattattatgttagtaaaactgaatttaagttagttaagatagataaataaataatataacatactggagcataattactaccgtctaatgacagttctaaaggtttgtttttattcctatgaaacatttgtcactattatgcagtagtcgttgatatacgttagtgttatgtcaataaaataaacctcatgataaaaataaacatcaccaaaattcatgttaagcgagatggttcgttatatacatagtaaaactactttactttactaaaacaaagtttaatgattatactttaatttatatactataaaagtttaataagaatgaaattaaataacatttcaacagatttaagctctttctctctttctgtattcatcgttatcatatcttcttcttggagcaccttctcttctttgtggtctttctctttgaggaatcttttgttcaattaaagtagttggaacaacaccttctgggacacctaagaattctcttaagtattcaataccttcatcagttaaggtgtagtagtagtattgccatgagaattgagtcttgacgaaaccttttgaagttaaggattgcattgccttaacaacatataagttcttagtatcaatagtatcgtgttggatttcgaaatctttctttgcaactaaaacaccatctataataatataaagttaaaaatataaggggggagaatattaatgttagtattatgtttctttaagtttatgtcatttgatgaattgttaagagatttagagatgtatgatatattagttatagtataatatttccaaatttctcatttatatgagtaagtgcaccaatttgactgaatatttacttccatattcactatgtgtaatattacttctcaaaaatgtagtatttatccttacttgcatagtatcataaaattatcactacataacatatcataacatattatatcaaatctttcattatatctaacataacatatatcatatatctaaatctactttactctccattaatttaatttaatttaattttcatttcatataatttaaatttatcatatgctataatatcttaaaatgtacatacctttgaataagttttcaaaaataactcttctgtcagcctttggaataatcatatttgatggttgatacgggtacttgtcctactgaaacttctaaaaaaatacaaatattaaaatattaaatatccaatatttttcccagtaataaaactatatcaaaactgaaaaattattgaaaacaccctcactacattaattttcattttttttcccactttttccacttttacttagacaccccggcaccgcaccacgtggcgctttttctttttctttttctctcttcgcacacgtttttcttttgcgtcgctttcccttttgggacatttctgcatgttacgcagtcacacaatctactgtgtctatttgcctcgcatgaatattgtattgtgtgatggattggtctattacctaaagcggaattaccgtattgggcaactactttgaactattcctcaacttattattaatccgttatacattatctagcaatctattatatatatatatttatcctctatttcatataatccatagacttaacagtctcttgtaaaataaccattctttggtgaacttgttcaatatctttgttaaatttatcttgcttctcatataaagttctcttccaatctttaaacttttgattttgcatttgaacaactcctgtaaatttcttcttaacttgcttctccaattctaaatatgatggatttaattcaactaattctttctcagtatcggtaattgtaattctatttaataaatctaaaatttcaattgaatccttctcttcaattaaatgatctaaacttggatgtgatggactattatcctttgtaacactcttccaactacctctactacttggtacaataacttccttattaaattctttaatacctaatttctcaacttcatcttcattaattgttaaactaattgctttacctaatctatatctcataaaatctttacgataattctcataataactttcagttgatgaaattaaatctcccatataactctcaattaaaaaatctcttaataataaaaaatcacaatgttcaggattctcaacttcacttaaaccccaattatattttctaccacgaacatttttaccttcttcattaacatgatattcaattgaattaattgttgcaaatggcatctcattaattaatgatctaattctactcttttcttcaattaattcacaaattggaatattttcttcctttaatgtatttctaattctttgtttaaatgttgataattcatcacttgtaaattaactctacttgataaatttctcattgcatcaatatctaatgctgataatccaattgctgatggtacaataaaataaagacatgcatgaacttcactatgaactaaatttgatctatcaggttgactttcttgataaactaatcttctatattgttcatcaatatatcttgtaattggataccaacaaaatttattatcaatataatcaccaaaacctggtgtatcaattacatttaatctcattctaaaaccatcttcaattaaatccattttatgatgagtaatttttgtagtctttgtaggattttgttcaaaatcttcttgataagtttgtttattctccattaataaagaattaaataatgtattaacaaatgatgatttacctgtacctgattcaccaacacataaaattgtaaaattagaaccttttttataaacttgtaatcttttttgaattgggaaacaaactaatccaatatcatttgaatccatatcatcaattgcagatgcataattatagtggtatttttgaaattttaaatcttcagaatgtgcatcatttaaagtttcaacatcaacattattattatcaatatcattattatattgattatgattatgattatgatcattatatttatcaattaaattaccatttttttgatcatcttcattatcgaaatgatttgaattaataagatcttgattatttgatacatgtttaaattcaaattcattatcagtttcagtttcaaaatcaaaattatcactccccctggaaatgccaatattataattttgctcatccattgatttactaacaacagtatctacattaattttatcttcaccattcattgcactctgaggggtgactacattaattgaatcaacaaccattattcaacagatgtaacttgtcaataagaagtatgttttaaggataaatacttcaaataaaataaagggcaaattcttccaactttaaataaacccccaaaaaagaagaatattaaccaattgccctgttttaacattttgaacaccgtatttccctccaatcattattctaaactagcctttgcatttctataagaaaggaaacaattccacataactccaatacttgaactaaatggaacttgaaatttctttggcattactgaaaaattaataaattgaactgggaaccaaactgaaaaactaattgctaatgtagttatgtataatttatacattttatccttatattcttctttacttttaccttcaataattatagttgtataagcaaagaaacaagataatgaaattggtgaaaagattaattgatcagttaaatctctctctaaaactgatacaattgctggcatatctgtaaacattgaatttaaaaacatataccaaacaacttgaataaatgccattataaacccccatgtaatgaatccgaaaaaccttctaaaattgaaaaatgttacatgattaaatccattttcaatatcatccagattttcaaaatcaataattacatcattacttccattaacagtttctccttcatcatcatctccataatctataaagatatttgaattgtcaaatgatgatctactatcattatcagtaaacccattaccacctctcatattaacctgtgcgatatgattaattctattatttgataatctctgtaatccatttcttctattttcattaaacatcgtgatactctgtgcacatgtatcagatattccatataacacaacattagtgaaaatagttgccagaatactagatcttgtgtataattgatgatatttgaatgataatttaattaataaataaccgaaaatcgataaaattccatagttaacaattggtatattgaatattctaaatgaatgtgatatttctcccatgaatttggaaaatgatttccatttacgtattattggattatccataccagtaactgtatgtacagcctgtattgcttcatcatatctatcattagcaccaatatcttctccaaattcattgatacgatcaattgtttgagagactagattgtctactccttttagtgtaacaggcataaatgattattaagtttagttacctttaatatgttaataaggtctatatactatagtggctaggctatgaaatattgtaattaagataaaatttaataaatcaacatttttacatgcattgttatcatagaaatttgaaaaaatgcgaaatcacaattatttcctaattaggaaataaaatttaataccactgtgagagcaggcttctttttcgaatttctaagtgttgtaagagttttgtaattctatgaaatttataaagatctaaattaattaaaaaggctaagctgataacttgtcaacttcaagagtaacattttcagtattttctttatcttcaacaggatcaataatttcttcagctattgataatttctcactttcatttggttgtgtcccaaggaaatttagaaatgcatttgctgacattagtgtatatccttcactaacaagttttctaattgtctcaattgttgctattataataatgattctaccttctcctctattctcctttgattcctgataaattgaagctatatgttttgaagcaacttgaggtgatttagtaatatcttgaagtctttcctgcaacacaggtcgtgatcttagtaatcccatattaattatttggaaagtataagcaagttcatttgattggtcatctaagtctacataactaattgggatattttcagattctgcattaagtggcaaaaaggtattgatatcattaatcagtctcatatttatctgtttaattagaggatttatatgagaacgaataattggttgattatcaacaaatgagatatactcacctcttaaatctcttaattgatgaataccatctctagagggtttaataattgttctttgagttaaattaccaacatctactaaagctttacctgttgttacagaaatatttttaattggatcatctaaaataacatttctaatatctctcatccttaaagttttaacaagtggtaaagcttcatctaaattattaagttgattatcaaaataattatcaacataacttgtataaggtcttaaactatttgaataagcaatattcattaaagttggacgtacaattcttggaccaggaatccaatggaagattttaatccatgaatcaacaataggataagttttcaaatgtttataaacatttgtttcagaaggaatagttttatccttattattatttttaagtgtagtgtttgattgtgtttttaattgctcatctaagttctcatccaaatgattattattattattaatatcattatctacattagaaacttcaatatcattattactaaaaacattagcagttgaatcaattttagttccagttacagaactttcttctggaacacctgataaaggttctacattagtaaaaatcattggtacagagattgattcaaacattttagaaatggctctaacggaaccagtttgagcaaagtaagacatgtttgtttttttattatatttttttttcaagaaaaggtttacaataaagttgttgttgcctggtaaaagagtagaaggaaggaaagagaaagaagaaagaagaaagaagaaagcagataagaagaaatagcaaatagcaaatagcaaataaaaggaaagtagaaaaggggtcttttatacttccaagggcaaatccatttcaaatctgctcattcctacttttaataatattatctccattactactattattatcatgagaaactatattggaaacagggcaactcggtatagtaattgtaatggtaatagtaatattaaaataggtgaagttacgtaatccacattaattattatcaagattacctaattgggaaaaaggtaaacaccattattttattatctagttttttcactgatttaaatttaaattaaatttattaaattcattacaacaatcatttctaaaaggtattaactactatcaggttctcacatcctttgaagttatctcaggtattttcttctattgtttttattgaaattactttacgactttactttattgactcatcatttaatctaatctaattatattttttcatatctagtataatattaatctgtacaaatctatattgaatttctgaaaaaatcaatacttagctaccttttaaaatataaacatagatttatcaattacgaaaataacataaataaaatggatatacctgattttggtgataaaccattagaagagactttttcttcaaatattaatatccctaaactgacgccaccaactcgaaagtcaaatacatctccaacaaagagaaataataataataataatacatctttaatatcagattctacttttagtttgctagatgatttccaaaacggtaataataatgaaacaatagacttattctctgctccatcattaatgcctccctcttcattaaattcaaatgataatatcgatccttctaaactaaaacctcaaaatagggggattttcagttttgaaataggttcatcatcatcatcatcatcatcatcatcattatcaaagactaatactccctccgacgctaatacttcaattttttcaatgttaccaactataagctcaaatacatttgattttggatcttatttacgttcagttacttctacatttcaaataaaaccaacaatacctgataatactacatcaattaataaatcattacttgatttctctaatcctgttaaagttgatttacttcgagccgatgatcaaaatttattagatgatttagaacttgattgtgttgtacgtgcaagtcattgggaatcagatgttgaatcagatgatgatttagaacttgatttaagttcagatggtacaaaagatgttggaagtgataataatatgaatatgaatatgaatatgaataaagtaagatttacacataatcaaaatgaaaatgattatttgaaatattttaatcaagcaaagacgaataataataatatttcctctaatacatctaaagtatcctttaattttgattcaaaacattcttcaaacataccttctcaaataccttatttatgtgatccattaaatagtgcaattaccgctaaatctgatagcaggcatagtagtccaatagcaaatgacaatttaaatattaatactaattcttcaataccattgaaaatatattctgataacattttttctccaagaaataatagtccaacatcatcacaaggatcagataaaacattaactgaaaattttaattcaataaagggaacaacacaaactataattaaacaagataatagtaaatgtttaccacatcatcatatatttgctgaaaatttaaaatctgcctttaaaccaatacccaaaactttactaaatttaatagttgaatcaagtgatggatcactggaggatgcaactaaatatgcaactgaaattaattcacaaaatagtgaaggtataccgatacctgaaaaaacaacggaattagttaatattccaactgctgctcctgatattaatggtgttaggaaaagtgcaataattagaggtgttagagcaagaaccgatattaagaaaccaaagaataaattaaatataagaaagaacaataattcggaattttcaactaaaataaatcaaacgaatacatttgctaataataataataatgatattattgctaatagagaaaagagagttatttttaatacactgggtgaacgtagaagagcacttaatagtgaaagttctaatacccaaaatataagagcaaataatcatattgataccagttttaaaggattttattcactgcaagagaaacagcaattttataaaagaaatattcaaaacaataataataataaattatatgaaaaggaaaattattcattcaatgatgatagcaatacaataactaaatctttccctacagcatttaaaagagctagagttaatgaaacttataatactgtttatgatgataatggtaaaaagaaagttaattgggcagataccttagaatggtaagaatattaataatgatattagtttttttaggcttttttttcttttataatgatttatttaaagctttaaatttttaatataagagaggtgtattatataaataaatagataaataagtaaacaacctcaaagatttttaaaaaagcttttaaaaaagtaagtgtttctgtttgttctgcattatgaaatgacatgtgtaaatacattatgaggtataaaaaaaatacaattcattaaaaaaaaaggtgaaaagaaacaaagtattgatgatggcaatgatgatgaatgaacttaagtcagacaatcagcggtagtacaattagcagttgcatcaattaaacaatgaatatcatgagaaggttttctatgaatacttgaagttggtaatgattgatcattagtatttgaaatattaaaagttgcactagtacttccattagaattttcatttgaatttgatggtgaattattatttgaatgtgatgaattattgtgattcttgtgataaactttgtgatgaataagtatgaggtaatacacgttgttttgcataaaatgatgaaaattcaggttgaatagttgcactagtgaataccataatcatgtaaacataatttaatttcagatgcaacatttaagaaattatcaggtgaacaacttaaatctgcatgtaatgaagcaattaaaacatgttctgttaaattccaaatatggaaatcatgaacatttaaaactgatggaatttctaaaatatctttaacaacatctgaagtttcaattgattgatggtgtaccttgtaataaaattcttgatgaacgtttacataatggtaatgcagatgaaaaaataatacaagttataactaatgaaataaatggatcaaaataatatttccaactataatcagttttccaaatgaaaattgctgtaagcatgaacaccaatattaccaagtgcatcacctaaaacgtgaaggaaaacaccttgcatattcagagatttttgattagtattatgagaatttttcctttctctttttatcagttgaatccagttgatcaacaacatattgtggcataacttgacgtaaatcttcactaccagtcattgtagaatctaataaaggagtattttcttgatcattaagttgagttgcatgttttgaataaattgatttagatctcttttttggaggatgattttcttcatgagattgttcatgagagtgttcatgactatgatcatgactatgatcatgactatgatcattttcaatatcttcattatccaataaattttcttcatcatgagcaccatgagaatgtgaatgaccaccaccaacactaccaccatgagaatggccatgttcatggaaaaggaataaaccaacaatatttgaaattaaaccacaagtaccaacaattaaaattaattttggattagtaataactggaggatcaagtaatctttgaactgcttcaatgaaaattgtaaaacataaagcaattaagaaaactgcattaattaaagcacctaaaatttcagctcttaaccaaccataagtatattcaccatcagctgatctagttttagcaacattaacagcccaaaatgcaaccattaaagaaattatatcatttaacatatggaaagaatcagcaattaaggctaacgaattaaccatacaaccaatgataatttccaataagaaaaacacggtatcaatgactaaaagggccagaattctatattcttttgaagataaggccattgtatttgtatattatctatctatcttttgcaaggagagagaagggggaaaataagttcaataagtaattgtctgcttacttaccgtgtctacagcagcaaatatgcgatataactgaaaggaaacaaaagagtggaaataaataataaataccgaccaaataaaaagagaaagaaaaaaattcatcaattccaagaaaatatgccaactcaacaataaaagaaaacacatgaaaaaaaatagcatggaacttcaatttctgattacttaatatcgattaagtttccaggttaccagtacagttattaattagaggtcttatttccacttttacttccacttccactttggtttacttttactttcacttggggattccttttcagggtttctgttgctttagattgttgtgtatattctatttatgtgtttatgtctaattgtaatctttaaggaaactgtacatacattccaattgtagattttattatcttgtacactcttattagtttaacactagtatttacactctgcttcacaggtttaaactatgatggctattcttggtcaaagggtgtcataaaaaaaggttgtttttatatgaatcactgtacatgtctttagtttaagatatactgcttctgtctatcttttctaatgggagcagataaataattgtggttttgttaagattaatggactaatctgtctttctctactctttccaacggtgtttcaacctaaatcataaaatattttagacacagctgtggatttatcacaattacaagagagataaacctagagataaatataacaacgatatatccggtaatgtatcatctactgaaagtataacatcaaatagcaaaaatatactcttattataaagcactttgaagccatatatcttatacatgtatacagctattaattttgatatatttaaaataaaacaaagaaatctgctatgcttagtttgttttagatgtacatacaataatatggatagctattattaacgttcaaaataaactatactattttcttcatttaagaaagtgtcggagttttatcattttgaatagcaactgttacaaagttcaaatcccaaaaacaaataactacctaaagtactcaaggctaatcattcatactccttcttagtttttagttaaaagtatgatcgagttgaatgcttatgttattgctttggtggctactaatgttccattgtcttttgttgataatgatggaagaaatgaaatgaaaagaagttacataaaattgattttaaagttggaacgactatttgaaattcctgaatataaaccatttttagtaatttttttagtcatcaaatgattcatatatgtttgatatgtggaaatcggttgtctcttttagagattgttggtgtttttttactgaaagatgctgctgcacagtcaggaaaaaggttagtcctcataaaaacagttttaaaaccactcaaaatcaaatggctttcttagcaattgataattgcaaatccatttataaatataagaatgatccaatgagttgttatcatattccaaagtgtaaaaagatttcaagggatagtgatttggaaatgacaaaaacatacaaatttgatatatgccaaccatctttcataacaaaatagctttaatttctaataaataacttgatctacactttttgaaagccaattaacaatacattaattttaaaatctaagctcattattacatcaacttttaaacatcaatttacgattacaaaaactattattagaaaattaaagttatagatcttgattttgctttgcgattacatactacaaaattcattacaaggtattaaaagagcttaataaaattcaagaagggtcgaattaataaaataatgtacttcctaatcataaaaattggtcttaatgttaaaaactgttatacatttactatattattattaaaaaggatacatgggatagtgaaaatagtacaaaatttaagaaagtagaggcacggtgtcataatttttcttatcgcatttctatcacacgacctttaataatactctacattactaatttttttgcaaatttaatcgatttttttagataatatacatgcatatttaagaaaagaataaaataaaagaaaatatcactaagacgtcaaaatgtaaaattattttagtttataatcaaaaccaagataaaactcaaacaaagaactataattaactaaagaacattaatttggttatttgttttgctctataaactgattgacaatgaccactcttgaatattttttgttggtatcacttttttttttgtttttttgtaatttttgttatagtaaataaaataaaaataattggaaaatcaattatcatttttttcaaaatttaaacttcgaaaacttcaacactaacaccggaattatcagttgcagtaacgacacaccaagcagcaccatcagcatcttgttgttgaccagaattactaactttatttaaaccaatttttttaggattgatttcacaagtagcaccattacatttacttggatcatcacatttaagtctaataccaaaacttggattttcattcttaaaaggacttgaatcttcaaaataaattggattccaaccaattttagcaaatgtactaccattatcatccatattaaaacctgcaacataaggtgcccaattaccataaggattagcagttgaaccccatctacaaccatcttcaacagaaacaccaggagcattaatataaaaatgtgaagcagttttcgcccaataatcagtacctggaacagctaaatcattacttgaaccaccattaacattagttgggattaacattgcttcattacctggtaaaacagtttgacagaatgcaacatctgcacttgcttgattaacagctttggcagtacctttacccttataacaataatcttgatttgaaattggtttatttaaattaccatttgaatcacagaataaaccaccatcttgagaacctggataagaataagttgtaacatcaggattccattgacctgctaaataaccaggttgacaagcatattgacaataagaacctgctttacatggaccatcttgagcccaaccttcagaatttgcaactttagtattaaagacagcaaccataccattatcatttgggaatgaacaagttttaccattatctctcttatgtgcatgatgaacatgttctggagaagcagctggtgcagcagttgaatcgttaattaatgctgataataaaacaacggagatagctttgattgataacatttttttaaaaaatttatttgtatttaatttaatttaatttaatttaaaagagtgtgtaaaagttaatttaagatataaaatttgtaatttaaaggaatgactaattaaacttttttgaaatgaatgtaagtttaaaatataatttgttttttgtttttttttagagtgttttgtcagtcagttgattgataaaaaaagaagcaaagtaaaataaaggaaaaaaaattataaagacataaataatattaagtgatccaatctacaaacataaccttaatcaccaaatatgggtggatgatcccagatatttataataaaactgccctgaaaaagaaacgactccagacacactataaggaagaaatgacacaaaacggcggcagaaaaagtccgttgcccaaaccggaaaaacagcaaaaataaaaaaaaaaaataaaaaattttccattgaaacagatcaaaagggtccagactttcccattttccaatataattgccattttgggtaaattaagtgaatttctcatttctcaaattgatctgtaatactctgtaatacaaatttacaacttttgtagtttctcacactgtgtctggatctgaatttctttttggtggcttagaggatactattagtgttttttgtttcggatcgccggttgcgtgttacgtaaacagactctgtttcttttctttttgtttgttaatgaatgatttattctttgcattcttccgtaacctagggaatacacgggaatggttgttgaagtgtcatacattaagtatggtaatgaaagtgttagacaagtaattaaacgtagtaaaattgataatgtcaattccagtggtaatgttccaaaagttattatacttattcatggtggggcatggcgagatgtaaataatacttgtaatgattttgataaatttgtagagaaatgggataatgatggtcaaaatttacttgtttatagtattgattataaagtttcaagtgaacaaggtggcaaatttcctcaagttgttattgaagtattaaaagctttagaaattattaataatgatattaataataatttaaacattgaaaaggataattacaatgttactcttgttggacattctgttggttgtacattcattacacaaattatggaatatgaaaaattttacacattaaataaactttcaataattgaacatattaacagtttagtattcttagaaggcatttatgatataaaattattacacgaagaatatccagattatgattttttcgttattgaagaatttgaaaatgttgaaagggcaattaaagaatgtaataatattggaattgatgaaaaagtaattagatatacaacaatggattcaattattattgttcatagtcataatgatgaattattatcattaaaacaaccacaaagaatggttgaatggcttaaaaataaatgtaatgttacaaatgataaattaaatgttcattatggtgattttggactacataatgaagtttatgaaaatatctctgatgtggcgcagctcacgacttcctaaaaaggcaggaggcggtgcgctgcggctaatgcgcgtaaaacttaagggcaagtcgtcaagtcgttgacggattttttgtacatttaattcaaacatttaatttttttagaatctttttcttaccattttttcccattttcactgattatgtacatatttcattccaacatgtgttgtcagatacgtagtgatattgtacaagaatatcttcttcctattttgggagtgaatttcaaccttttttggccatgcaatactgaaattcaatcgatctgcctatcaaatggttgatttggaaggctttacagaataaatcctattagatcataataattactaaatatatcctatattttaagaatactaaaaaaattgtaaaattatgtaatttactcctttaaaattgatctggtcgtatatttgataatattataacttatgtagtggaaaagtataatcagatcatcaataatacgtcaagaattagtataaaatataggataataaatacaaaaataacacacatccatacaccttcagtatatagccgacttaagtaatatgaaaccccctctctctctataacttcgctaccctgtgcattatattgaatcaaagttgatctatttctgctttccctcgaacctatttccccttttgccaccttggtaattaagtatattgattatcattcacgatactatttaatatacgtatcttatttacaaagttaattaacaaagataattactgaaatcaaacaagtttctttagaaatttaatctttagaattatattatactacttcattttcctgttacctactactaatttatatttgtgaaaaatataaaataaagagagaaatacataatcatcgacaacccgatactctctcttcctcttctcctctctccttttagaaatatatttcattgaacttgttttagtaacttgtttaaataaatactttgtcaattacgtatactctattaaacaagtattttattcattggttagaattgaaaaattccaactgaactaagtcaactcaaatcaaataattgtcaaatcaatccaattcaattcaattcaattcaattcaattcaattcaattcaattcaattcaattttagttcatcaagttttattaaccaaagtctgttaataaatcatcgaatcttaatgtatgttactcttttaattcttttttacattcatctctaatttttcagtttactaacaattactctttcaatgaatttcattgaatctctaaattcattcaattatacaatcaccgttaaagaaaaggatttcagattcagaatttccattacgaccttttccttatcctacatgatttaaaatgtttcaaaatacaaaagattactagattccactatcagtttcataaaatttatcaatcagatcaatgatatatcagaaaacacactacaatgaacttttttcaatttcctattttaactttctctttctctttccctttctcttttttcatttactattcatcaaatccaaaaataagaagatgtgacctgtcacaaacatcccccaatcatagtaacaatcaactatagaaagcaagtgtgaaaaccacttatactttattaaagcgattgagaaattttgattcggtgatttttcatttttggatttttttggatttttcaacactcatttcaatttttgacattttttcaatctcctgcaaactttccctttgggttttcgagaatgatccatttctcttccttttcaatctttccaatatctctttctcctattctttattggattgattaaaattattttatcttttatcaaagatctctcatagatctattaattttattaattttgacatttttttcattgtttgttgtgtttttttgacttttatcaaatcttatcacttgttcaagaaatttaaccaagaagaaagtcatcacaagcttctcaaagttctcaatcattagaaataaaatataaacattttaattattcattaaaaaaaattaaaaaaaaagacaggtcaggtcaaattaatttttctgaattcgaaatcttctttatttaacggaagttgttaattgcttgaatttcagaactttattttctacagcttgttttcttgtacattaaattattaaaattttatttaagagaaagaaaatcaattactcttttattcaattttattttgttattatagttgttatctgtatcaatagatatattatcatcaagagataaattatttcactaagtttcattttgctatattttacgggcatcgttattttaatttgaatttaccacttgttttctgaaattcccatttaaaaaacagaaaactttcacttgtatcataaatattattaaattattcacattggttagttatagaagaataaataattaacggttcctactcataaaaaaatttgtttttatttcatttaaaaaaaatctaaaaaaatatcaaatcatatatcatctaataaaaaaaatattataatgtccgataatactctttcttcatttgaagaatctgtctctaatgtcaatgttaatgccacaacaactactacccctccaatgggtgagtattctaataaatcaactattaatgatggaattttgtctttaagttcaatgtcaagttcaatcttatccaataaaaatggtttaaattccggaagtaatggaaatatcactgattttgattctttaccgaatgttttaaattctttaagtttgaatgaaccaacatccattttcaatactggtacaatcaatccttcaactccaccagctgattggaataataacttaaattataatttgaattcagttaatggtgtaccatcacatcaacatacctcatctaattcatcctcaacaaaggatgatcaaaatgatgttcatcaaaatttatcattctcaaataatattaatgattctgcaaataattcatttatattacctgaaaatccaacaaatttacttcaaaatcatcaaaatcattcttacttatttgatcaatcagttaaaaatactccatcatcttcctatattttatctcctgatagaaatagaaatcaaaccatattcaatacccctattttgaatgaaacttctagaagattggattacaatttaacatctccaaataatatcaatcaattggatgaatcttatattgatcaatctacttcatctgcttctaaagttttagcaaataatttaaataatgaatcattaggtatgggaattcaacctgttatcaacccaaataatgcaaatcaacaaattaattcatctattttcaatggttatataccaaatcaattttcatttttaccgccaatgaatgcggtcaataattcaactactccattaaatggtttatcctctaatttgattaattcaagtccatctacttcaaatatgttacctcatcaattaaatggtttcatgaattcaaatcaaatgatgttaccaaatcctattcctaattacccaactaatttattaaaccaaaattactcctatgataatttcaatggtaatgtaattccagaaaatcaaaagcaaaatcaatcaaatcaacttcaagctaatgatcaagttttaaatattaatcataatgcaaaccctggttccaattcaaataatcatattaataataataataatcaaaaccataatcatcaatcaaacagaaatggaaatggaagccgtaataatttaggtttaaactcaactgccaatgtgcacagaaagcattcatcaaataacagaagaggtgaagatgcttcaagattcatcaatgcaactttaaatgattttgttaatgaaatttactatttatgcaaagatcaacatggttgtagatttttacaaagacaattagaattacatggtgaaacagcagcaactaaaatcttcaatgaaattcaacttaatgttatagaattaatgattgatccatttggtaattatttaatacaaaaactgttagaaagagttaatgatgaacaaagaactactttagttgaaaatgcatcaaatcaatttgttagaattgctttagatcctcatggtacaagagctttacaaaaattagttgaatatatttcaactgaaactgaatatcaaatcatcattgattcattatcttcatatgttgttttattaagtagagatttaaatggtaatcatgttattcaaaaatgtttacaaaagttaccttctaaatattgtaattttatattcactgcagcttgtgagaattgtgttaaaattgcaaaacatagacatggttgttgtgttttacaaagatgttttgatcatggtactcctgctcaatgtgaagatttatctttaaaagttggtgaaaatgcagttgaattaagtattgatccatatggtaattatgttgttcaatatgttttaagtatggaagaaaatagacttagaattaagaatgatcctcaatctgttaataagattcctgatacttctaaatcaatttattttattattaattcattagcatcaaatattacaaaattatcaacacataaatttggttctaatgttattgaaaaatctttacgtataccaacattagcaccaattttaattaaagatttattaaattcaccagagaatttgaaattattattacatgatgcatatggtaattatgttttacaaacttcattagatgttgctgatgattcaagttttaaagaattaagtgagttgttgaaaccttatttaaatgatgttagaaatactccacatggtagaagaattttatcaaagttaattagcagaggtggcaatgcttcaatttataatgtttcaaatatttcttcaattaacaatgaagaaatggaagaacataacaataatatcaatgataatttcaacaatgaaactcaaaatggctattacaatgggtcaaattttaaagatagaacaaattcaaataatcaatttggtaatggtactaataatcgtcgtcacaataacgcatctaattataataattataattcagattataattcaaacaacaattatattaataagaacaaacaaaagttgaattactgagaaaagattaatttatgatttaaaaaaaaatttccatcacttgtcttttatgaaattaacgaaagtaaaaatagagcagtatttcgttaatatgttttttagtctgcacatgtatctttattttattgtttaagtatttccagtctatatatatatatatctatacatatttatattatccttaataatttctaattaaataatgaattcgaaattgaaaaaatccctttactagaggaagatatcagattagtttcctattcgggtaataaataaaaaagttaaaattgtaattttcatgtagttacgtgtaatgcacttttgactaattttgactaatttttgactaattttcactaacaaatttgttagcgttttatggttaaaaagttccaaaggttgatgttgcttttatggtgtcttttgaaatacgcgttatatgttaaaaattattttattgtgcgcgagaagaatctttttttaaatcacagaacatagccgttttgagactaagtatgtaaaatttcaaatgcaggttgtatgagaatttaaaactttcttgtttaaaattttgtccattgttagttttgatatcgaattacgtaagtattggtatgatttccttacttttaagacgaactgaacttttctctactaagagtttctaaattaatatcctaaagtaaactaaataaaaataacatataaatggtgtaaaaactaaattctttaatctgaatttcttctggaaaaaacatgttccacaacatcatctgatttaatttccctataaggaatactttcaacggaatcagaatcaatttcaaaagtatcagcttcaattaatatacctgaatcattaagatgtcttttacctgcaatctttggacaaactttcatatcatatctttctaaaaaccaaattagaaggaaaactacatgagaaccagcaattaaaccaatattgaatcctataacctttcttaaaactaggtgcatctttaacatcatattgtaatgggatagagaaatgcattaattccatatgatagtgcctgaatccaactcaaaacaattgctttcttttcaacattatccctacataaagttgcaacccaagtataataaacttgtgcaagacctgataaaaatggatgttctaagaaaaatgctgcaattaacatattatttggtacattccaaataattaaaacaatacatgaaaaatatgctgttaccataactaaatgcattggaattattttaccataatattgacataacggtgaaatgaaaattgcacatggtataccaacacaatacatataagaatcccatgttgtaacttgttcaactagtatataattctggttttgatttcatataaagttttgcaccattagaataccaaccaatatgatgtaagacccataatgctgatgcaagataaatttgccaagtagtgacagtttccctaagtgatgcccaagtgaattgttttggaattgcaactttattctccagtcgctttcttgcaaatatcatatcatcttcactgaaaactgtaaaattcttacatgatgatggaatacctgggaacaaaaagaaaccataaaggaaaataccaaatgtaataactgcatcaatgataaattgccatctccaaccagctaatcccataacaccgttcaaactttttctagcttgtgattgcaatgcgcctgcgcttgcactaccagcagttgcgaatgcaccatatacaccagctcttttgaataattcttcttcagtgagataacttgataaaataacataagtacaaggaaatgaacatgcttcaaaaacaccaacaaaaaatctaattgcatacatttgtccggcactagtaacatacgcattagccaaagtcatcataccccatgctaattcacaaaataataataaatgtctagagaaatggggtttagtgatcaagagagtgattggaatttgaaataatgcataaccaacggtataacaagtattaaaataattcaattcattaccatgaagatttaaatcagttttcaaaccggaaacataagctgaaccaacattagaattatccaaatactttgtataaaatgatgcacagagaaagaataaaatagttgcatcgaatttcataagaaacttacgttcatatggactataatgtcttggataccaatcaaatgctttaaggaagttatacttatcatattttgaagtcttctttgctcttctatctctatcaactgttggatcattgtattcagttttaaaagatttaggatcatcaattttgaaaaaatgccaaatagtttgtgaaactttactttctttccaactcatgtttgctttggtctggcttcttaactcaaaagaatattttttttttgatcagttagatgtctttttatactcattatatcaatgtggttatttaaacaactacggcaataaaatgtggtatccattttatatacatagatcaacgtttacgagccaccactatttttacaaaatcaactgaaaaatttatcattactaatattaatctgcgatgagttaccacccttttttttctgatgatcttcaaatgccgccacggtaaggctttccggtaagaaaagataaggaagttcaaattagcataccccccattatgagcaacttggcaaattgtggtttaaacaagaaaatagattaatgttaaatattttattaagttaaataaattataaaaaagttaaatagatagattaagggtaatttaagcatcccatttctttaatggtaaacctagagattctctttgagattttgattccggatcaaaatatggaatttcagctaatgaagtaactctagtaccatgtcttggacttttaccttcatgatcccaaacatttctatgttgagagattctgttatcccagatagcagatgtaccataacctggtttagtgtttgtccatttaaatctagcttgaatatctgcattcttttcataaacatcgaaaagataatttaaaattaaatcactttcaattggagaaacaccaagaatacgtctagtcatacctctattaacgaaataaaatttccaaccagttgctggatgagttctaactaatggatgaactctttcaactcttttagggccacctaatggatcatttctatcaagataagcatgtgcagaaatataaactgctttcttaccatctaaaaatttcttaaattcatcacttaatttatcataagcagcataacctgatgaccaaatagtatcaccaccaacacctggaatagaatctaaatgtaaatgagtataaccagctggttgtctttcgtgaactaaatctgtgtgccaaccttggttaccataacctaaatatctaacactatcccaattggcaaaattggaattactaaagtttaaatctaaacctctcttaataacataatcattccaaataacagtttcaccaggtaaaccagtaacatggggaacttgaggatggatttcaacattaccataataatgacctaaatctaattgagcttttggagaaagtttttgatctctaaagaaaacaacaaccctctcagcaataagtaatgctaattcatccttttgttgatcacttaaatcttctaattgtaaaccaacaatttcagtaccaactttatcagttaaattaatgacttccttagctgcaccaaataatgctttcttttctggatcagcatttgcacctctgtcaacaaatggaacatcataatctctaatagcatgagcttcatcaacaaagattggaattttacttctatcaggaacttcaggataaccttttgataaatcaacaccaccgtcttcaagtctctttctacttgattcaggtaacaatttagtaccttcaagatcagcaccttgaacgatctttatattctcatcccttgttctagtaatatttaactctttatgagctctaactaattgttcaatttgtttgtcaataggtaaatcattgacaatatctaaggactcttttttaacagtttcaactttactcattttcttgttattctttgttagtaaaaatatttcacttagagtacttagttaaagtgactatgcagctatttttatactgacaatttgattaataatcaattaaaccaccatgggaaaaatgatcataagataagaagtagaaaccaaataaaatattctccacagtttgagccaccacagctatctggtgtgaaccaataaatctgtattaataatcaataaatattaagtgccttactcaataaaagatttagaatctttgtttaacatagtaacaatggggcatctcatcaacattaatctctgttctcctacctctctattcatctttcttggaaataacctctgatctctaaagattctttttgcgcagccgccacaatcggattatcttttttcatttgtaaaaaatacatataccataaaccactataacttaataatatggtgaggttttttctatcaaacgcatacgattatagtttatatgtgactgaagctattgatcattttaaaataaattaatataatatatatcaaaacaatcatatatgtaccttgtaaaatatgttgattttttgtaaacaactgttatttgaaacttaagtgtattattggaggtaattcaagaacaattttgattgtatcaacagcttgacttgtaaaatactatgttttgaaggaaaaagtaataacaagttggaaaatcttaaaattattctgagaaacaaaaaatgcaaattttagagagccttaaattttcaatttttactttttatactgtgccaaaggtttatttaaattattgccttcagttttaattagctagttattccattaaagtactaaaatgttagcccaaaaaaatccatgtcacgtgacttaaaaagttacacaccaaactcacacaagggtttcaaaaacatgtaaatgaacgacttcgccggctcccctctttcctaattaggaaatattaactcttcaacttcgcaagagtttcctcttttgttaattggttgtaaccaaccaatcagaattatcctaattcattcttgacttcgagaatgccaacctctcttaatacttatcctccaaattacaattattaattatttacttattattatacttatttcttttactttattttatattattttatattttattttaacaagtagttccttattaaattaccgaccgttcattctcaattggtagcaccggtagtgttaaaagaaaagatgacaacttacggaacattcgaacaagaagaaagacctacttccagtgttaatatgccaacaggatttcatttcagcggtaaagaaaccgactctgtttttaaagctcaagcactgttaaaaagattagagcttaattttatttgccaagagtctatgggtaaacaatgtttagatatttacaaggttgttagtgcagtcaatcaattaactggtcctgctttaaattggtatactcatcgttttgttaatcctcctagctggttagaatttaaagaagcatttattcaagaatattgtccaactgatgaatttgaaattagaagtgcagctgcaagatataatgcaactacccaagaaaataaatctgtcgaacaatatatcagagagttcgaaaaatttaaggctttattacctgctgattatgaattagaatgtgcaactagagatagattcattcaaaatttaaaacctcaaattagaagtagaatttttcaattacgtcctgaatcatataatgaagccaagtttttagccaaggatttagaaaagaacaataatttctataaacctaattttagaaagcatagatttaatgaggatcgtagaggcgaaccaatggatgttgataacttaagaactagattcaatgattacaagcctagacaatccacaaattctagaaattcatataattataataattcctctagaaacaacaactcttttagaaataataattcatctagaaataataattctttcagaagtaataactataatggaaattataataatggtaataggaacttcaataacaataacatcaacatgaatgagatgaacggttatgatgaaagatccaaccctcaggctttttaaacacgtcaggtggtaacgtgggccttgctggcgttaattcaattccacaaaatcaaactttattgcaaaacactaatattattgaaaaggaacatataaaaaattatacaaaaaacttaaaaaattatacaaaaaacttaaaaaattatttacaagaggatagcgcaaatttgaattcgaatttgcttgtattaactttatcaaacattcatttagaggtaaacaatttattatttttaaaaactattattaatggagaaattgaacaaaagagtttattagatagtggagcttcccacaattttatttcaattgaatttataaaaaagaacaaattacaaaatcaaatatttccattaacccgatccgttataattaatgcagctaatggagaaaatattcaatgcttaggaacttttacaactacagtcgaatttgaattaaaagatgagaaacattatgaagaagtgcaattttatgtgttagacaaattggtacacaaggttatttttggtgtcccatttatgattaaatttggagaacttattccttggagcaatttaagtaaagatgaacaagaaatctcatacactatacaagaagaagaacaatatgaattaccagcatacgaaaacgaagataatgaaactgaattagaatattatactgctgatgagatggaagaagaagaaattatgaacgaaaagaatgaagaaagcactagattaaatttaaacatcatcactacagaaaggcaattaaaaagaaatgtgaacaataaagaaaatgcaatattaatgggatatatttactcaattgaaaatgataatgaagaaaaagaagaagaaaacggtattgaaaagccttatgccaatactgaagaattaagaaataaattatacaatgagttctcgaacacaattaccaatgatcctccaatgcatttgcctccgaaaaggaatttaactcatagaattatattgattgaaccaaataaaaatgtgtatcgaaaacaatacaaattgagtcatcaggaaaagattgaattaaataaacaagttgaagcactgctagcccaaggatttgtcaggccatccgccagtccttttaatagccctgtcttgtttgtaaaaaagaaagatggcacgatgaggttgtgtattgactatagaattttaaataacaatacagttaaagataagtttccaatccctagaattgatgagattatttcaaaatttggtaaagccaaagtgttttcaaaattagatttgatgtctggatatttccaagttagaattaatgatgaagatatggaaaaaactgcattttctacagaatttggtcattttgaatgggttgttatgccttttggtttaaccaatgctccgagtacatttcaaaggatgatgaatgaagtattgggtccatatctaggaaagtttgttcaagtttatttagatgacattattatttattctccatctatcgaaacacattatcaacatttacgagaagttttaaatactctgaaacaaaataaattagttgctaaaagaaagaaatgttcactattctatcaaagtttacaatttttagggcatgttatatcaaataaaggtgtccacgtagatcccactaaaatagataaaattaatgaatggccaattccaacaactgtgaaagaagctcaatcatttatcggtttatctagttattatagaagatttattgctaattattcaaagattgccgcacctatattcaattttattactggtaaaagtaaatgggaaaaaccacaacaagatgcttttgatgaattgaaaagaagtctaactaatgctcctgtattggtacatcctatctgggatgaaggttataaatttgttgttcattctgatgcttgtggtagtgctctaggttatgttttagaacaagttgatcctaatggtaaaactcgtggtgtcattgcttatggttcaaagaagttagttggttctcaattaaattactcaatttatgatcgtgaatttatggctgttgttgaagcattgcaaacatggagatattatttactcaatagacattttattttgaaaactgatcacaaatcacttatttatttaaagaatcaaaatttaattgatagtacaagagttgctagatggttagattatttatcccaatatgatttttcaattgaatacattcaaggaaaaaagaattcagttgctgatgcattatcaagatatccatataaggtttctgctaataatttatttatcacacaagttgaatctgtcgttgctcctaatgaagaactcaaggaagaaattataaaaggatattctaaagatgaagaattaagtgaaatttatgatgtattacaaaataatttacctgttcctaaaacaatcaacaattatattaaacactatagattgcatgataaattactttattttactactgttccaggtgatatttcaaatagaattgcaattcctaataattcagaactcattagaaaattaattaaaaatgctcatgatttaccttctgctggtcattttggattttataaaacttatgaaagattacatggtatgttttattggcctcatatgttgaagtctgttaagaatttttgtcaaagatgtttattatgtcaacaatcaaaagctgaaactcatggtaagaaaggtttattttctccactacctattccacctggtagatggactgatattacattagattttattactggtattcctccttctagaagtggttacgatatgattttagttgttgttgatagattttcaaaaatggctcattttattccaactgttaaaacattaaatggtattggttgtgcaaggttattggtagataattgttttaaatatcatggtattccaagaagaatggtctcagataaagatattagatttactagtgaattttggcatactgttaataagttatttggtacttctgttttattttcaactactaatcatcctcaaactgatggtcaaactgaaagaacaaatcgtatattaaatgaattattaagaaattatacaaataatgatatctttgaatgggacaaatggttatctgttgctgaatttgcttataatagttctcatcaattatctattggtatgagtccatttgaattatgttatggttatcttcctgatagtccttcaacaatgcaaggttattctattcatgatttaagatatgatgataaggctgctagatttgcaaaaagaatgaaattaattattaaacaagttcaagataatttagttaaatcacaacatcaacaagaagtccatcataataagcacagaagtgaaataaattttaaagttggtgattggatcttattacataaagatgctcatggtcatgattcaaaatattataaaattcaacctgtttattatggcccatttaaattagttaaacaaattggttcaaatgcatttgaagtagatctcccaagtatgaataaaaaagatagagttatgaatgtgaaatggtttagaaagtttttacaagctgatagtggttttcctaaggttccacctagaactttagctgaagctgaatcaagattacatgaaataattggtattgctggtatagatgaaacaaataattcacttgatgtttattggagagattgcgatccatgtcactcatcttctattccagttgaactttttacaaaattacctgaatcagaacaagctacattatggaatcgtgcaagagctttagatccaaagaatcatccttcagaaattcaaaataattctcaacatgaaaatttaaattttataacttcgaggacgaagtttcctgggaagcgaggtaatgtaaatgaacgacttcgccggctcccctctttcctaattaggaaatattaactcttcaacttcgcaagagtttcctcttttgttaattggttgtaaccaaccaatcagaattatcctaattcattcttgacttcgagaatgccaacctctcttaatacttatcctccaaattacaattattaattatttacttattattatacttatttcttttactttattttatattattttatattttattttaacaagtagttccttattaaattaccgaccgttcattctcaaaacaacaatttccgatatagtgtaacggctatcacggtccgctttcaccgggcagacccgggttcgactcccggtatcggaacacacttttaagcctggctagctcaatcggtagagcgtttgactcttaagtattgatatttaaccaatagcaatcaaaaggctgcgggttcgagccccgcgttgggcttaattttttatttaaaattacttccacgtcctttaaccatcgaagtaaaaactgtgttttttacatgtctagtgatcatatttttttccatcaagcgtaaaagtaactagtgtataaaaaattaaaaagctaaatttatttgatgttataaatataatagtcaactatctcatctaattgattatcagttcttttccaagaagcaattgaattattttctaaatcgatttcaaacattctgattcttctcaaatacccaccatatccaccataacctccatatccgcatccaccaccttggcatagtgttatatcatctttattaaaacaaaaatcattagcatgatcatggcccacggagattaatttaattccaacatctttcagtacgtcaaacatatgagtattaatatttggtgacacgattgtttctaatcttttaccttgatattgttcaggatccagctgataaatatccctatattcaatcattggtatatggaagaatgccattctaagtgcattaagtgagtttttatgtgatgattctaatgctttaacatagtctttttgactttctttgaaccagtcatatcgaaatgactttgttggtgagtatgaatgggaatccaacatgtagattattaatttcttattattgtcattacctttgaaaacaatttcataattaccaaaaccatcaacatcttcaggtcctttagaacttaaagaataaggcaaatttgaagagttagttaaatccatcaattctgctctatttaaactaccttcatcatcatgattaccgaaaaccattgcatacggaatttttctttcaattagcggtttgagaactttatacattgacgtctcagaatcaaatgatgcttcaccgaaaatttgatctccggataaaataaccaaatctgggttttccaggtttaacactttgttcacaaaacttagtgtcaattcatcagccaaacatttttttgttgagtaatcttcaggaacaaaatccaaacattcaccaaatccagttgataaatgcaaatcagccaattgaacaattttaagctttttattagcctttaagttgactgagggtaatttagcagtgactctatgcttaacaaatagataaacttcataatcaaactgatgataatcgatttctttaacatcttttataggtctatctgatcctacagataactcatctttcggatttatgctcaatggatatagagagggttgaaaccaaccaggaataggaatatcagcctttggaccaaataaatagttaatatgagaatatgattttttatatttagttgatacatgataccataaaccatagccagcgttgaaataaccaagtttttttaactcagagaatgtcttttcattattagattcaattaaaatattatttggaatctttttgctaacatcattatgactattctcattttctttcttattgaaaacatagaattcatcaactgccggaattgattccttcttaactatatcatatggtaatctaacttcataagcataaatagtactaaaatagtttttcttagcatataagttctttttgatataactaatttgggctttctctaaaaattcacgatcattaggaaaaatgtcaaaaatttgattgatattattagtgcatgattttagaaataagaaggaaaagcaagtttcaaacccaactcctactaacacataagaatcttctaattcaccctttgaattttcaagtatggtagctgaatttgaagctggagaattaaaaatagggaatttgcttctagatgatgggaatatgtgtgagattagactgttttcattgaaataagcatcgaaaaatatgaatattgatatgcttataaatatatgtaatgaatttttcttaaacgttttttgagaatgaccattttgtggtgaatatcgaatattaaaaccttgctttatactagtacagtctttttaattaaacacgactacatataactagtaaatatgaaaaacggatctagatatttactaagtccgctataacttaattttcagccactcgtaaaaattttgaattcccagtattttttatggggcgcggggggccgttactggggattaaaaatcaccaccggtgactaaaaataaagttacagcgtataccttatctgtatacatttgattactctatatcccactagtcagtcttatttaatcaaaagactgtatataacctatgataacgctaagacgtctccctagtcttgtacagattaagattttggtgtccaaattaaattaataaaatctatccaagcccccttgccagggcaatgtgtatacgaattatgcgctatcattcataccctaatacccctactaaatttaaaatttgaattttaaggctcagcgatttctgagttgttgtcttataaagaagatggcaaatccacttattcaattattgttttttcttttctgtttttcagctcttttttggtttactcttattcatctaacagatgttaacttagttgtaaaacattatggctttgctagttttataatcacaaacagtgaattcaggtccttgaccttgcaacttttttgtaaaatgggtgtttgaagagagctgtttaaagcatgctcaaccgcatactttgcatttttctacatcttataataacgcttttttttagtccaaactgtttccttatgctatttttgccatccacaaaaccatctaaatccgaactgaattattgaaacattctgcaactttttgcaattgggaattcaaggaaaatattaacagaacttactctaagtgagtcttccaatgacttgataaatgattcatatttatcatcaaaagcatatcttatcaaacaaacacctgtattaacaccattttgcatttccaccactttaccactgtactgattgcaatcatacaaatcagatatatacctgtccttggcgaacactaacagacattttgcatgttcaggagatttattcataatttcaactctacttttatgataatcacctggtttgccagtacttggattgcggttcttgaagtggtaacatgttaaatacatagcaatttgagatttttgggcatctgaatcataaaaatcatcatcaacaattggaaaaggaataagcctatgatcaaaaaccatttcatcaccagaaaacaaacatttaaaaacatcttgcaacttcagaatatcaaatttgagagaaccataaattggactatcaacaaattcatcacagtattgatcaacataattctcataattggcttccataaactcacaaaatttcttactaattgatacaggtatattattatttaataataattcggttgcatcaatggggtaataaaacggattttcatcagcaaaactttgtgatctcaattgtgagagttcagcttcattagttgcaagtttgttacatctttgggagtagggactgcattagtaccaacaaaattaaatatggagtggaagttttagcagcataattaccagtgtcagctaatagctgtaaataactcagttattgattaattgttatgtcatatagaaattgaaattaagaaattaaataaaaaaagtaagtagcaaaaaaataaaagagagcctcttgggttatataactaaataaatcattaggaaaagtaatttaatcgtcaagagcaacttcaagaatttgcttaggaatcaatctaggcattttaccatctcgaactttgaagcttggagattgagatgctaagttactgtaaaatgaaaattgtgatttaagtttgccacaaacatcatcaaccacgcaattagcatcttttctcatctcatcaaaataccttctcctagcctcttcaaagtcaccataaatttgagctttgaattgttcccggatacccttcttgccatctacaaaaccatccaagattgagccaaactgtttttcaaaatctttttgcattatcgaaaactttgcctcgtgtcttgacttcagttctgcagcttgatattccatcacatcagcaaaactgctcataaacccctttagatccatttcccattcttctttcagatccttatataactcctccttgacttcagccttgatttcagatgttaatgcagattttaattctgccttcaactctgatttcaagtcagccataatttcctttttaatttcttccctcatttctaatttcagctcaccaagtaactcgttcttaaaacactctgtataatcaccgattgtctctaaaacttgttcctttgaatcactaaccatttgaataacactttttctttctctagcaaataatttaacattttcatcattagcctcccgagcaatagtttcaagctcatcaccaagagaagtcttcttttgatctaacattgtcatatgttcagccagaacatcagccgtagcatctcttatattgatttctgcctttgcaatcatatcttcccaaacattgcgttctggtccaccgacaccagaacccaaatgggaatcaacaaccacatcagcatcatcaataaaacctggaaccacagaaaccacctttgcatctgaggggtgatgggaaacaatcggatggccagttccgaatgcatccccatcaccaccagatacagagttggcgtccttacctccatttgaaacactatttccgttgtttggctcaacatccaacaaatataaaccagaattagactcatcatcagtaataaaacaagattcagcatcggattcagcagcagattcaacatcatcaatttcatcatcattaagttcatcatcattaaattcattatcattatcagcttcattattattaacttcattatcattatcagcttcattattattaatttcattatcatcattagcaatatccttatctttatcatttccatcattttcattttctttatcaaatacatccataaaacatggaaaagtaacagaaatgtcacttttattggtggataccttggcagagtcttcagacatttttgcactttctgatacagcttcaactcttacagtaataattggtgccacatagtattcattggaaatcttaatttgggatcttttcttcttagcaattctaatcaaatttctgtgtctgattgcaggatcacaaccagcaacatctcctaaataatcaaatgcatcttcaggaatatcatcatcatcttcttcttcttcttcttctttctcgctattgcctgcattggctttagcacgtcttcttttcaacatctccttcaattctctaatagtttcagactttctcttacgtcttctcaatctgtgcccagaaatttcacccttgttttctgtcttgacaagtaatggtaacttcttttcatccttcataccagttaaaagacattctgcatattgggagtagcatgtgtcatcatccatttcatgaagatagaagtcatcagaataaaacacttcacataattcagctctggatgttttgtatgtgacattttgggattggaaatcacgaatatctgatggttgtaatttgacgattgtatcattatgtttactgaatttgaaaacagaggttgcaatatatgtggcatatggaaccattgcactatcatcttcagcatatgtgagtaatttaccagcatcatgttcagtaatgaaagtcttgttttcaaattgtttcttgaagtgattgtagttgttaatagagaatctgtaaagaaacttaggattgtttaaatacgtttcgatttctgattgggagacagaaaaggataacggggtaatatctgaatagtatttcttagcatgatgttttttgtttggatgttctaagaagtatttggtcatagaccattcaaatactaagtactttgcaacttgaatgatataggttgcagaagcatttaattcattttcagttaattcagcatagttggaagccttagctttaagaaattcaccggtgctcttaataacagcattaatgtttgcacatctaactatgttagatcttctagtagtgtgaataccaatggaaaagttcattgttttgtatgtgaaatgaacaaaatttcaaagaaaaacaggaaagaacaacatggagataccaggaaaacaaaacaggaaaaggggaatcttctcataaatacatcaacaaatccaacagaaaagagggaaaccaccaccaaataaaccatgcaaacaggtggaaaatagggatcaagtgctatctcggacttcaaagattcccttctccgacccccagatccttcagtgttatcatttcaaaatttcctcgcatttttcgtgacatttgtctgcccaaatttccgaaagggtgtggcaagtgatgaattggtgtaaaagatggtgtgtatattcattgtattcactagcaacggtagcaatgagttgtaggctcaatcaaaacctaagattttttcttggattgaaaacccaaatttaacatcaactatgatgacttataagaaaagtcttcagaatgtttaagttattcaaaatctgtctttcaattgagattaattatatcatctttgtatcttgatgattgcgtagtaatttatagcaaagtatatttgatctaagaataagaaccttataaatgactcaaaaaattgaagtgacgaaagcaaatcaatgcaacagattctaagaagatctgttctacagagagtgtaccacgaaattcatgaaaaatttaagagggggcatgatagaaaattgaaaattaaaaagtactcaagcacgaatctttaaggaagaattagcttctttcattgagctacaatgttatgagaacagtgttaagttgattcaaaaagctaatctaatactggtatatatatgaatagagactcatttttataaattaagcgtatatatttgaaaaaaacatacaatcttataattaattgatcttattctttattactataaaaagatacgtttgtttccttacaatatacaactaaatgatctttaagtatatatgatctttaagtatatatgattctgctttttctgtgatcatttcttataatgtaaataaatttttttaaatagttactattacttagtttttgacaaaagagctttcgtatatatgtcatgttaataatcacagcataacaattatttatctgtagttggtctatgatcatttgtcttaagcaaaccaccagcattgtctgtgttttttgttgaattacctgcaaaaggccctactactcttgaatgtggtttccttatccttctatcatgagggtcgataagtttgtctccaaaaactaacttagcattttgtaactccttctccaaatcttcattgcataattttttaggcacattgtcttgttctgataaattggtattcatgttatggtatagtacggtatatttatagttacacaaagaaaagaaaggtgtatgaacagactaggaaaagctataaaatgctgcgcctcccaatgttgagaaacttttttatgacatttttagtataatattagaactttctttattgtcaaattattcaatgttcgaattaaatcagactttcaaaaatttcaattctaaaagttgatgagcagatgatctaagtgtatagtcttttgtaaatactttttcaaaaaattcttcagatccagtgtcttccttgtttgcacgttccggcacagcgggttgagctcttcctgttccgatttggaaaagagcttgcattggtgataaacctggatatggatgttttccggtatacatttcaatgacaagacatccaactgaccaaacatctgctttggaggtgtatgccacttgtttaacaacttcgggagccatccaaaaaacagaaccctgtaatgatgatcttttgttgctatttttattctcttcatttaatttttcttcttcctcttgtgtagtcttcttagaaattccaaaatctccaattttaacattaccattattatcaactaaaatattaccaccctttatatcacggtggatgattcccttaccatgtaaatatgttaaaccaattagaacctgtttagtgaaatttctaataagttcctcttcaaatggtccatacattttaagcatactactcacagaaccaccagggatatactctaagaaaatgtacatattagaactatcttcattggatcctaaatatctcacaatatgatcatgagtaagttccttcaataaggaaatttcttgttttaatgcattaaccataatacgttttgatttttccgtttcattacttggcaaatcaacttgtttaatagccatcaattctcctgttagaccattaagccccaaataaacattaccaaaagatccctgaccaatttttggacctttgtgccaaatacttggaccattattaacttctgcatttattatactcatgatctcttgatcattactttcattattttcatcatattcttcatcatcgtcatcatccagtaattcaatcacattataaggttgttcatcctctatcttttcatcatcttgattatttctaatatcagaatcatcaacttcccccggtttatgaatggccagaggtttcccaattccataactggcctcgcttatcatactcattctactggaagcaacagagatatgacttagacgactatataatgagtctctattcattttaaacatttcactatcaactcccttattcatcttattcatcattttattactatacatagacataagcaaagattttcttttaatatccttaatttctctattatctagatctgggaaatattcacgtaagttaccactaatcaattgacttggaggacgtccacccataaatggatgaatgtttctctctgatgtattttgctcaagattgtcgttatgactatttctctcatttcttcctctatgaattttatttgatgtgttgatagattctatacttacacttttatggttttgacaaataatgaaacgtcctgtttcttttggtatttgagatgaattgaaaaagtcgactaaagctgcatcatcaactagagtaagatcactattagatttctcataatctacataataaattctccagccttcactaaccaagcctagacctaaaaagattttttgtctaatttcattaccattattgaataagccattgatactaatatttttaaagtcacccttatccataattataccaatagtaaaagattttatactttgtgaatttcgttgagatttgacattttgatccaactgtgcaattgaatttgcagcaatatcgatacttttattcaaaagatctttaggaacatgttgtttgatcttttctaatttcaaaacgtggatcaatatctgaagtcttaaacgatcgcctaccttattaactcccaattcttgcaaggagtatttatccaatgatgtgaagagttcaactgtgatatcatttttttcaaataatgaaatatactcctggcattccacagattcaagcagtgaaaacagtttttccttttctgaatcaagcatctacaattcttttattgagtattagattactttgggtataatattaaataatttataaaagttctactaaaaaccgtgtataacacccaccatccactaacaatagtcaaatcgcattgtgtctattttgtgggaaaaaacgcttcactaagcgatcataggcccaaaccctattcacttcttcattgattttcattgagtgttcattatctgaagtggtttcatttactcttcttttgaaggaagcaacaatgtcattactatcatagcttacaattccatcacttggtccaacaatttcaatatattccatgaaaaatgtctcaaattttattatcaacaataatgctctttctttgaataagagtcgaaacttattaatgtcaaatagtaagtcagccgtgtttgaaagtagatctgtaccagtaaatatcattttagccaatttacaaaatttttttatcaactcatcagttatttggaaacttacatcattggaaaactccaccaaggattcaaccaatttataaacttttttattttgttcatccacatcaagaaggttttcaatatatttattaccaactaaaccgcctcttggaagttctgtgtcaatttgaataaactttttggcaatatagttgttatagattgacaatttggatatctgatccgtttgatttttgattagtttactcactttagcataattctcataatcctttttcatttcacttctgagataatatgccatctgtctctcaatgtttaacccactgatttctttccaacttagtttatgctctgttctccaatgctgtggaatttccaaatatagtggttcatttgattcatctatggcgatattatcattacaggaattttccaaattttttgaattataagctttattaggttctgtcacttcattttgctcgaaatattcatctagtttatcaattaatacatcaattctgggacttgattttcctatataatctttcaaatatagtaaaagctttctgaagtcctttgataatgaggtaatcaacttatagaaaccttcttctccttcgaattcatttacaaaatattcatcaatatcaagtgttttcttttcattgggattttcctctgatattctactatttcgatttatcacaaaagttttgaatttgggattttgaattattagtctagtgaagcgatttcttagtttagagctttctaaatatgatggatacacatgatgaagcctttgtaaatgatcaaaaattgtttcttcaatatcatacttgttgtttcttatatccaatattatattcaggaaattaaaatgtattaataggagtgttttgatattactgaataagtatagtgtcacttttgagtttaaaagtatcttgttttcttcaacaaatgatttaaatttcaatgataattcgaatattagtttcagcttcttgactaaatttgtttcaatcgatataaagtcatatggtggagggttatttaatggtcttaagatattttcatctactgagtcgatgtattcatcgtctgagccttgagcataactttgaaaaaaatcagaaattggagtggaattatcaagaattgcatatgagctttgaattctattatactggttatttgaatttctttgaatatcgactttttctttgattttgttctcatcattttctagccattttgtttttagcattaaagatggtaataactcttttctatcaccattcttatcaactagaacaggttttgtctcttgtgtttctgttgctaattttttatatttatcaatttcatttccatcattacctttgaaagtataccataatgattgtgcataaggattagaaggaccgttatctgatccaaaatgatcttgagttgatttttcaaatggagttggtggtgttatataaggtttgtacacatcgtcatggagttcacttgagtcaaataatgatgtctcatctgcttgagtttttcttggaggtgttctaagttttttcagatagttgtagctgttttgattgttttttgctgaatatatatcttcggggtacactgaagaagaagtgtcatgatatctaaagctcatgttttgtatattttcttatctcttatatctatcttttgtggttgattaatatatgtattttatgattttgtatacaacagtacctaaaaaggattactagtaaaaaaagtacaaaaggatcatttacggggtgataattagcttgaataatactccttacatagctggaagaaacgcaagctattgcaggatcaagatgttagaatggtgtttcatcttgatttcatgttaaggcaccctttgaaatattttttagattcccaaaaaggaaggtctggcgagctgaaagtatttaacatcaaaatccttgactctgtaattttatcaaaatttacctgggaagaaagttgcaacttttattcacttccttactaaacacgttccaggacagtataataactgtttcaaaggcaaatctagcgtatgtcaatttcaacttggaggcaatttcctttttttgaaggaactccgattaaagatccatactatggatctgaagccgatgcattatattcagatccagcactcacagccatctcaaatgctggtgattttatagcaatcgcaacatacaaatctactataaaacttataaacaatgaatttaataaaagattagaatttcaatgctacgaagaaggttggacaatcaataaaatgtacattttttgaacctcacaaacaaaaatcaaggccccttaggcaacaatcatcatttttagtaacaattgcagaaaggcaggggtatcctgtatcattaaaattatgggatttgaaaaagcttttggatcctaagtttaacttcaaggcattcgatttcaattcaagtttccatactaaatgtgatatatccaatggaccaaataattatcctatgacatgttttgctaattcaaatgattactcaatattgtcttttggttttgctaatggctcagtgatactagtaaggggtgatattttacatgataagggatatagacaaagactgatatttgagagtaaagatccaataacgtcagttcatttcaaagatgatcaaactttatttgttacaacaatttccaaaattttcactttatcaacacttggtcaaaacaatgggaaaattgataagatgattgatgataaaaatggagctgatgttgactgtactgatattcaaattaccatctcatcaggaacaacaagcactaatttattggttgctagagaagattgttttcaattttataacatgagaggtaaaacacattcccttcaaatgaaagtacgaaaaagaaatgttttcatttacaaaaataggtatttactattcttaacacatattgagtcagatctttcatatgcaagtgattttacgaacaacaaactaatggttttggacttgaaaaataactttattgtattcaatcaatcattctctggtgaaattaaggatatttttcatgtttggaacgatctatacgtattgttaactgatgggtctttacttcggttacatgagaagtctttgcatgataatgttgaaattcttgtaaataatgaaatttttccaatagctttgaaattagttaacgaaaatccaaaagagtttgaagttaatgaaatactgaatttgaaaaaaaagtatggtttctatttatatgacaaatctgagtactctgaatctatcaaacaatttatagaatgtattccattgggtaaaacaagtgaaataatatcaaagttcaaagaaagttccaagatccaatatttaattgagtacattcaaagtatggttgagcttaaactaacaaatgattctcatataaatctcttactcacctcatttactaaattaaagatgatggatgattttaatgcttttattgaaggaattatgattgatgaagactatgaaatcatagacgctgagaaacacaaatcttttgatttaaatatgatcattgacttgtgcaaagaaaatgaaaactacgaatctgctctattaattgctgagaagttcaatttgccgtctaaaattgtatctattcaacttaacgaaattaagaactactttcatgcttttgagtatattaaatctctaaatgttaatgatctactaggagttttgattgaaaatattaatgatttattgaatcatttgcctaacgaaactacacaaatattaatcgatgtttttacaggtcaatataagccagcagtgaaaaaatcattagacgtatgggactcattggttaataataatgataataaattatacagttaccctttgctaacatcatatcaacaatttgtgtcatttatgaatcccaagtcagctgatcatgaaacaaattctgtgactagtggtgacattcaaacaaatattgatttaccacaggaggctccaacataccagcctccaagaccaagaattattttttcaagttttgtgaatcacgattatgaatttgttatatttttagaggcatgtattgaaagttatgataagtttggtggtaatattcaagataaaaatgatttattaaatacattgtatgaaatgtatttgactgtttctatcaaatctggtcaagatgagagtcaaagaaaatcctggctggagaaagcttcaaagttgttaaaggatagaaaagagtggacagagagtgataaagtgacaattttaatgatttcaaacatttataaatttagtgaaggtgaaatgattataagagaactgaaagagaataccgattctttgatggaaggatttgaacttgatttatttagagcatctatgtttgctgatgatatcataaaatcttttgaaatagtgaaagattatggggagaaagaaccagaactattccgattatctctcacgatgtatacatccaatgactattatatggaaaaattaggagatgaaaaggataaaggaactacttgaaattattgaacaaaaagatataatgacaccattagaagtattagactgtatattggcaaatgagaataataaaagtcatttggcaaatgtaaagttgggcttggtgaaggaatatttgctaagaaatattaagaaacaaaaacaaggaataattaataacgaaaaattgatgaaagactatgaaaatactaaaaataaacttaaagaaaacatcaatgggttgcttaatgatccaactatcattaattcaactaaatgttctgtctgtaataataaactagattttccaatcatatttttcagatgtggacatcatgttcatgaaaattgtgttatagagatcaattctcataatatcctggataatagtgaagatggtgatatgaaatgcccaatctgttcaaatgatcatgatgcattaaaggctttgaggaaacaaagaaatgaagtcaaattgctacaggaatcttttgattcatctttaaatttaagtaaggataaattcaaagctatgttcaatttccttggacgtggtggaatggaatcatcaagtcaaatagttgattaattatttaacttgtttgtactattaaacaattctagaaacgcaattcattttatataaatagatttataactatacataaaatataaccatttacgcattaccggattgttcattgtaagtagaactaaaacaaggtcaaatcttataagtttttccgtttattttttgtcaagccgcctcccatattaaaaattgtgagatttttcataagatttagtataggtgctgagaatataatttctaataatctgttgcattgatttgctttcgtcacttcaattttttgagtcatttataaggttcttattcttagatcaaatatactttgctataaattactacgcaatcatcaagatacaaagatgatataattaatctcaattgaaagacagattttgaataacttaaacattctgaagacttttcttataagtcatcatagttgatgttaaatttgggtttttcaatccaagaaaaaatcttaggttttgattgagcaactacaactcattgctaccgttgctagtgaatacaatgaatatacacaacatcttttacatcaattcattacttgccacaccctttcggaaatttgggcaggcaaatgtcacgaaaaatgcgaggagaggaaaattttcgtggaaatttttgaaatgataacactgaaggatctgggggtcggagaagggaatctttgaagtccgagatagcatttgatccctattttccacctgtttgcatggtttgtttggtggtggtttccctcttttctgttggatatattgatgtatttatgagaagattccccttttcctgttttgttttcctggtatctccatgttgttctttcctgtttttctttgaaattttgttcatttcacatacaaaacaatgaacttttccattggtattcacactactagaagatctaacatagttagatgtgcaaacattaatgctgttattaagagcaccggtgaatttcttaaagctaaggcttccaactatgctgaattaactgaaaatgaattaaatgcttctgcaacctatatcattcaagttgcaaagtacttagtatttgaatggtctatgaccaaagtacttcttagaacatccaaacaaaaaacatcatgctaagaaatactattcagatattaccccgttatccttttctgtctcccaatcagaaatcgaaacgtacttaaacaatcctaagtttctttacagattctctattaacaactacaatcacttcaagaaacaatttgaaaacaagactttcattactgaacatgatgctggtaaattactcacatatgctgaagatgatagtgcaatggttccatatgccacatatattgcaacctctgttttcaaattcagtaaacataatgatacaatcgtcaaattacaaccatcagatattcgtgatttccaatcccaaaatgtcacatacaaaacatccagagctgaattatgtgaagtgttttattctgatgacttctatcttcatgaaatggatgatgacacatgctactcccaatatgcagaatgtcttttaactggtatgaaggatgaaaagaagttaccattacttgtcaagacagaaaacaagggtgaaatttctgggcacagattgagaagacgtaagagaaagtctgaaactattagagaattgaaggagatgttgaaaagaagacgtgctaaagccaatgcaggcaatagcgagaaagaagaagaagaagaagaagatgatgatgatattcctgaagatgcatttgattatttaggagatgttgctggttgtgatcctgcaatcagacacagaaatttgattagaattgctaagaagaaaagatcccaaattaagatttccaatgaatactatgtggcaccaattattactgtaagagttgaagctgtatcagaaagtgcaaaaatgtctgaagactctgccaaggtatccaccaataaaagtgacatttctgttacttttccatgttttatggatgtatttgataatgaaaatgaaaatgatggaaatgataaagataaggatattgctaatgatgataatgaaattaataataatgaagctgataatgataatgaagttaataataatgaagctgataatgataatgaatttaatgatgatgaacttaatgatgatgaaattgatgatgttgaatctgctgctgaatccgatgctgaatcttgttttattactgatgatgagtctaattctggtttatatttgttggatgttgagccaaacaacggaaatagtgtttcaaatggaggtaaggacgccaactctgtatctggtggtgatggggatgcattcggaactggccatccgattgtttcccatcacccctcagatgcaaaggtggtttctgtggttccaggttttattgatgatgctgatgtggttgttgattcccatttgggttctggtgtcggtggaccagaacgcaatgtttgggaagatatgattgcaaaggcagaaatcaatataagagatgctacggctgatgttctggctgaacatatgacaatgttagatcaaaagaagacttctcttggtgatgagcttgaaactattgctcgggaggctaatgatgaaaatgttagaatatttgctagagaaagaaaaagtgtcattcaaatggttagtgattcaaaagaacaaattttagaaacaattggtgactacacagcgtgctttaaaaatgaattgcttggtgaaatgaagttagagatgaaagatgaaattaaaaaggaaattatggctgacttgaaatcagagttaaaggcagaattaaaatttgcattaacatctgaaattaaggatgagttaaaaaaggagctggaaaagagttgggagttggaattgagggaattcgtggctagttttgctgatgttatgcaaggtcaggttgtagaactgaaatccaaatatgattcaaagtttctcagaatgcaacaggattttgaaaaacaatataattcaatattggatgatgctagaattggtcactttaacatgagggaatactttcaatcagagttagctattgactgtgcagatgtaagaagaaagttgtatatggatatgaagaaagatggtcagtatgtagttgatgatgtttgcaaaaaactttcctcaaggtctgcattttacaataattcaaatttcagattaagagatggtaaaatgcctagatttgttcctaggcagatcattgatgctgtttctgctgttgatattgatgttgatgttaatgctgtttctgttaaaagtgctgattccaatcctaactctgattccgcatgtgctaatgaagttcctatttctgattcaatttccacttctattgatgtttccaatactgatgctaataatactactacaactgatttttttaatactaatgttggtaatagggatttaaaaacctggatatcattggaaagatgtaacaaacttgcaactaatgaagctgaactctcacaattgaaattacaaagttttgtagatgaaactccactttattacccaattgatgcaaccgaattgttattaaataatgatatacctgtatcaattagtaagaaattttgtgagtttatggaatccaattatgagaattatgttgatcaatactgtgatgaatttgttgatagtcctatttatgactctctcaaattcgatagtctgaagttgcaagatgttttcgaatgtttgttttctagtgatgaaatggtttttgatcataggcttattccttttccaattattgatgatgacttttataattcaggtgttcaaaaatctcaaattgcaatgtatttaacatgttaccacttcaagaaccacaatccaagtactggcaaaccaggtgattatcataaaagtagagttgaaattatgaataaatctcctgaacatgcaaaatgtctgttaatgtttgctaaggacagatatttatctgatttgtatgattgcaatcagtacagtggcaagatggtggaaatgcaaaatggtgttgatacaggtgtttgtttgagaagaaatgcttttgatgataaatatgaatcatttatcaagtcattggaagactcatttagagtaagttctggtaacatctcccttgagtttccaattgccaaaagttgcagaaggtttcattagaatttgttgaatagtattgttatttgttatttgttatttggttattttattttgttaattattaaaaaaaagaaaaaaaaagaaaaaaaaaagagaattctggttatatgaagaagtatttggaaaatatgtaatatttaaattaaaattattttatgtaaatacttactttttttatgtgatgtttaattctaaagcccttgcttaattaaattaaaaatataatatagaaatcgctatgtagttttaacattattaattatacatctaaaattttgataatacacctgggtttgattcaaccacattatttaaacgagccaatatatcctttgttagcaaattattggatttttccttacttttatcatcattctttgtttgatccttttccttgtctttacccgtagtttgattaaatccagctaacatataaattttaacaatatcatttggaattatacttaattcttcattcatttctatcatttcattaataacttcaattgctaaaaattgattttcaccattggctgaatttaacattgcagttgttgaattattatcatcaccaagtttaacttgtgcatataaaatatttggtgtaataacagttgctaaattatgagtatccatctttgaaccaccagcatcatcatcttcatttgtattagcaaatgttgcaacccatgaaaggaatgcaaataatacttcagttaaatcacgatgacttttaggtaacattgcataagctaattgtaaaattcttttcttcttagcacttatctggattatcaccatcaattttctgtgaaagtaaaaataaatcatataatttaaaagttaacagaggtattggtaaatctcttaagaatttcttaagtaatgcagctaattgaataggagtttctgttgaaaatgttggtactttttcaggatgtttatcaatttcttcaactaaagctttcaatcttctaatattaccatttaatctaaaaaccccttctgcactaacatcttgatttctcataacattaattaattcatcaatcaataatggtatacgaactttagttgagccaatacctaaatcactatcaacaccatacttagtaactaatgtagtaagtgcaacaccaaaaacaccttttcctgtacctgaaatagtagcagagccagatttaaaatcatttgaatgagagttagcattactattactattatgattagagccaaataatttttcccaaaatgataatgatttatgaacatcaatcattgaaatacaatcttcaagtttcattttatctgaaagtaaattatgtaatgcaaatgcagcaatatgacgaatatattcatgagatttattattcaaatctgagtatcttatagtatgattcatttgattatagtttgaaatattccccctcttagtagcattaacatctttttgttttattggagctgtctcatattgtggattaagttgtaattgttgtaatttactttgttcttttaatgaatttttattattatttgaatttccatcatctaattccttatatgaaacagattttggaacaggaagatttgatatctttgatgaataatctctcttttggaaacggaatgcattaggtctatgttcacgagcttgttctgaattaacaattctgggtatatcgtcaagtgttaaagagctttcatttttcaataatttagatgttaatgtagcattagcagtaccattttcactattcattgattgatttcttgataaattgttaagtttattttcacgttgtgattttttagtacgatcactactattggatatattcctcactttcaatttcattgatcccatagttcccttacgtgaaatttcatgacctctctttggattattaatcttattttgattttcaattatattggtatcattaacattttctgttcctgcactccaagcagttggtgcttcaataataactgattttcttatttcatggttagcattactcagttgtctagattcacgcaatgatcttctacgagcaatttctgtaactttattttgataaatatctatatctgagttttcagatcttgatttatcataattaacatcctgtattttattacccttaactgttgatttatctgtaacatcatatgaattcaatgaattgacaatacttgattcacttaattgctttgaatgattctttgcttttcttttatttattactattttagatcgtatcaatgcaatttctaataaataagctaattgcatatacttggaaattaattggaaaccaataagtgcatgaacatcaccggatgcacatgaaggacataatattgaatttgatttaacattatatccagcttctgataaatcacctattggaatttgttgattatttggacatttagaacaattaaagcagtcaatatgccatcttttttccgtggtattattaattttcatttgtatacattcttcttcaatactttttttacaagatgaacagtaatcatcatatttagttggaggtacatttaaagttaaaaattctttagagtaattttcatgtttggatatttcacttaataatatttctgtaggtctcattgagtttgataatttattaaattctaaagcatgcatcaaagaactttttgaaataagcttaataaaatgagcaattgttgaaattaatgatagcagttcttgagaatatttattgtttgacattttttcagagtctgtatctctaaggaaagtaaggtatgacataatttttgaagttaaaaatcttggttctttagttaatttagaatagctatgatattttggagaatcataatcgagtgataaatgattcgttaaagaataattaaacaatatttccacacttttgaataaacatttgattttaaatataagttttgaagttacaagcaaaccttttgatttatcatttatagttgttgaatgtaacatttcagaaattaatgaagcacaagattcttcaaattcagataatgttgaccaaataagtatagttaatttttctaaattcacttcaactttatataatttttcaggatttgaagatatttcctctattgattcaatatttaaacctaatgaatttaccgttacatcaacattccaaaatttatgaaccataaaacattcaggatgccattgttgttgtttaccgcctctataaatttcaacatattgtttaacgattgcacatttacaactttgacaatgatatgcatatagtttagaataatgataatggcaataaattttaccttcattagcataataattatcagattcaaatactttatgacaaatttcacaataaaaatgatctgaatgatatttcctattcaatgcagttatatagggacctctaattgccttatcacaattataacagattagatcaattcttctaaaataatcatattcacataatggtacatttatagtttttagttttattattattattattattattattattattatttaaaggatcatttacttcaatatctgcagcaaaaaatttatcagagcatggtttaccacaatcatgacaagtaaaacattcaacatgatatatattatccattgctctaactaatgtaccaattataggttttgaacaacccttacatattttaacttttttaattttatttggtttagtggggcttgaagttattaaatcgtgtgatgtatttattgaaacatttggagcaattttactttctggtgtatttggattactaaaattaaaattattcgatgttggagtgaaaactggatttccttgagatttggatggagatgaatataattgatgataatgatgtttattattatttatttgattattatcattattattcgtacctgacttactaaaattattagttgattgattcgccagtaggttatccgactgcatgatatatcaacgggaaaaactcaactgtgtatcttttttattctttatgaactctaaaaatagtttccaaacaatggaaagacactagttccctatttttttctaaattaacagaggatgacagatatctataataccagacggaatgtgtataaatagaatcaatgctgggagagttccaatagcccaagatctatataaaaataccaatgatcaatgatcttaatgagagcaaccccactgaatggcaaactcgtaaaaacgttatttatgaaacactggaaacaaaaacaaagaaaacaaagaaagcaaaacaaaaacgtcataattttgccttccccaaatttccgaggagttacagtaagtatttctgaaatttccgaggagcgtgtgggatagagttgcctatttgggacatcgacatgaataattgtagagacccattcattgaattaaaggttccaccaagtgtcaattaattgaatcaattattgtttaataataattacagagtgttgtttgacacttaggtgtttctttaagaaattcatttaaaagaaatttcatatttaacattaccttttaagttttttaaaaagttgtcaaagatagatagatcatcatatagtaaatgatatcaaaggatagaccaaaacgtgcatattctcgtaaaggttgtgttcaatgtaagaaaagaaaggctaaatgtgatgaagggaaaccctcttgtgaaaattgttctaacaaatggtagaacttgtgtttatcaacagctgttgaaatttactgatagacgttcatttacgctaaaaggggcttcacttcaaaatattaattctgaaaaattgaaaaagccaaagaaatcaaaaacggaatcgttatcaatttctgacttaaataaactgacgtcaaaggaacaacccaacaatgataatgataatgataatgataatgataatgataatgataataataataatagtaataataataataataatagtaataataataatagtgaagatgttaacaaacaaactgataataaacaaaaatctacagactctacagatccatttattagcaatccacctcaaattatccaaaatcctcttaatgtagatataacttcttcacttaataaaattttaaatcttactgatcataataaggctaataatatcaatataatggaatctacaaaatcatctgatacacccgataaaggcttactagcctcctctagaatagatctagagaactcgctttttgatggtgcatcaactttaattaacgatttaaacgagttgatcggatcatttgatgtactagattcaatggattttaaagcacaatctatgggaatgaaaataccagaagatatagcattacgttttgagcaaaatacacccagaccaaaacaagattttgttcctgaaataacttcaacagaaaaaattaatgacaaattttcaccagtaattaacaatatcaatgatgttatttctactgatttcccaaaactaaattatatgggaaaagatactgatgacaatggcattgatacaccccatccgatagataatgataataacgataatgataataacgataatgataataacgataatgataataacgataatgatgaaaatgattatgatgatgacaacgataatgaaaatgaagaagcggaagaaatcacatcaaataaagactatataaaaacattaactaaatccctagcagattatacatcaacctcaattcctaatattaaatcccctgctgaatctccatatggatttcaaaatgacaataatacaaattataaaacattaaatacaaccaatttaaaggcattcccaccacctacattggaaactttactaccgtttgattatattgaaatgttaaataaaacaagagatgatgaattttttgattctttatcttcatattttaattgggattccaactctttccatattaaatatttgaagatttttgtgacgaatattcatttaaatgtcctcccattctcaacaagttattcagaaaatgcatatactaagatattcttaaaacaagctaaacattctcctcatttattatttgctattcttgcaatagctgcaagattcgaagtataccaaattgaacaacatccaaatattgataattatgaagagaaactcaattatcataaatcttttagatcatattatttatcatcttgtttaaaagcattagagtcagtgttacattctaaagaaaatacaataaataaaattgaatcattattactaacaattcaagttttagcatctgatttttcaggtcataaaggttctcaatggaggactcatttacatggtgctaaagatttacttattaaatattgtcgatatcgtcccttatctttagaacttacaattgtttggatttggttctattcaatggaagttttagctgcattaactgctccacatggtggtacaattcatgattttgatgaaatggatgaatttcttccagttttgtgtcctaaaatcccacaatatcttatcgattttggcagatcagagaatgttttcaaactacagaaaagtattttacttgaacctgggaaattaacttatgcaatctcttatttaggtataagtatagaaggtaaactagataacggagatatttcaaggtttaatatgtatttaggttatgatgaggtaatgattgaagttttgaatgcattggtgtattcaattgaatgtattaaggggaaaaataatattgggaaagttaaggataaaccatattctaatacaactgatctttatgaatcaaaaattctagatagacaaggtaaatcattaaactctgatttcttattatcaatatttgcattgataaaaaaggcaaaaacttttgaatacatgaataattctgctccatatattgtgtcgccagataacgaattacatccaagtcagatattacaatcagtaatgaatgagaataatacagaacaacctgaagaatcaaagaatttcaaagctttagagaaaatacgtatatctgcatatattcaccctagtcaagattattcccctaatgtaactccatcaccaaattttgaaaacttaaacaatttgtcagtttcaccagacgtagtcagcagagtaagttcaattgatagtatagtttcaataattaattccaaaccgtcaaattctaataaatcaacatcaaacttaaatgaagttctctctatttcacctaattatgatattcaagatactgataatgaagatagtagtaaatatcttattaataaacatatcgaagaattggcaaataattttgattatgttaagaataatgtttatttttcatggattgatttatcacagcaattatatgcagatgctgcttttttaagattactaacattacatggaggattatcaacatatggaatgagtattaactcatccttagtacaagatgttgttaatagaatgattatgggattatatggtattgttagatttaaggaacaatttgcagaatcaattgatatagatattgaaaattatgatgtttcagataatgaaatgaaagatttaaataacagatattttagtaagagtttttctgaaatggaagagattaataatgatacattattattaaaatctgttaaagaactatcacaatggccaaattttgaatttgataaatacttacattatcaatttgataatagattagttatgattcaatggccattatatgtttgtggattatgttgtgtaactcctaagcataaagctattattgaatgttgttttacaggtttaataggattaggtgttggtagtggagaattaagtgttaaaaaattaagaaagatttggacattacaaaaaatgggtaagtttgatcatgaaaagtttaatttatttggacaaggatttgatgatgatgaagaggatgattatgttccctttatgtaaatagtgtaagtataggtactttcttcttttatagagttgattttttcttttaatatacagtggggggttttttatctgtaataaactaaatatacaattttttgagaaatgaatgataatctatcaaaatatctatatcaatctaataattcacctcttctactttcatcttttttattaatataataacgttgttcatctttatatttatcaaatttactttcacgtttaagtctatcaagtattttagtttcttcatcagttgttaaattttgtaaatcaggaggtatttcttgcatttgaactgaaggtgcttgatttaaatatcgtaaattttccatcaattgaactcttaaattatctaaatattttttcgtatttttattttcaaatctatcacctaaatttggatgtaatgaataatcaggttcaaaccatgatctaaatggtatatcatcaggtaattttgagcttaattcattattagtcattatactagtttcataacaccataatctactaacatttctaggtgtataaccaccaccaccaagacacatcatgggtataccaaaacttttaacatatttaacacattcaccatgagctttaatatttaaattaaaacaacctaatctatcataacctaaagaatctgcaccacattgttggataataacagttggtctaaattttgtaataacaggttcaataactgatttaaataatttaacatatgaactatcatcaataccatcctgtaatggaacattaagagcaaaatgtttacctttaccaacaccagtttcatcataattgccagtacctgggaagaattctccattatatttatgaaatgaaactgtcataactctatcagtaagataaaaagcttcttgaacaccatcaccatgatgtaaatcaatatcaatatataaaactcttggatgaactcttaataagttgagtattgccataactatatcattaacataacaaaatccacttggttcatattttttagcatgatgtaaaccacctgaccaattaattgcaatatcactcatgcctgaaattaattttcttgaagcatctaatgaagcacctgcataaaattgacaataatcatacataccatcgaaaactgggcagtcatcaccaatattaaatttttttaaatcatcagcaaatttagttgaattttgtggtgttatacgttgtaaaaattctatataatcagctgaatggaaattcaataattcctccttacttgctctctcagtttgatataaatccatttgttcatgtaatttatatccactaactaaatgatccgtaagcatcaatctaaaaggtttcattggatgtcgtacaccataatgataagctgcaacatctggattataatgatatgaaacatttggtttatatccaccatcattaaaagtatttattattggttcaaaaaatggagtatgtttagctgttcgaaaatcagttgcaaacgaactgtctggatcagaccatgaattatgtgccatttataagtggttaatactaactgttcggccagaagtctagagaaagaaagaagtgaaagtagtaactaattaattctctgaagttcttctatttgagttcgaattcaaaagcgagaggttttacaaatttaaatggatttttgaaattattgcatttttggaattttacggtggcaaaaggtcttttatatctttttcttattattaaaccattgtatactccatagataatcaatagagaatagaaatgtcaggatcagcaggttttgatagacacattacagttttttcaccagagggacgattatatcaagttgaatatgcatttaaggcaattaattcaacaaatcttacaagtcttggtattgtaggtgaagatagtgtttgttttattaatcaaaagaaagttggtgataaattaattgatccttcaagtgtatcatatattttcccaatttctaataatgttggtatgttagcaactggatcaattgcagatgcacgttcgttagcaactagagctagaagtgaaagtgcagaatataaatataaatatggatatgaaatgccagttgatgttttaacaaagagaatggcaaatttatcacaaatatatacacaaagagcatatatgagaccaatgggagttgcattaacatttattagttttgatgaagaatttggtccaagtttattaaagactgatccagctggatattattttagtgcaaaggcaatttctacaggtccaaaacaaagtgaagttgttacaattgttgaaagagattttaagaaagcattaaagaaagattctgaaaataaagtaataattaaaggtgagtggaaaaaacttgtagaatatggtattacaacattaagtaatgcattaagtacagattttagaaaaaatgatttagaaattggtatttcaacaaaggaaggtttcaaagttttaacacctgatgaaattgatgaaagacttgtctcaattgctgaacaagattagaattgaaattttccaaaaaaaatattttctataattagtgttataatattataagatcataactaaagtgaattacagtaaattaaattaaaagtagttataacatgagattttactctgctgtatatgcattgtatctattgtactgtatattgtaatgtatattgtaatgtatattgtaatgtaatgtaaggtaaatgaaaatagtagcttcaacaaatgtttacgtaatcaattttaaagtcacgtgacaaattacgtaacgggtctttttatttttacaatttattatacgatttattatacgacaaatatacgataattatacgacaattatacgacttatacgacatcgatattgacatctaaaggtacagaatttttcaatcatttaaaaaaggtttattattattattattatcaatttgtttcttcttttttaaactattataccttccttttgagagtaacaatggtcgatactaagaaatcagatactaaggttgattatgtgcccccaactgaatatgaatttggtggtccagttggtgcaattggtatgatgataggtttcccattattaatgtattatatgtggattagtcaaaagttttataatggttcacctgcattaccaactgaaggtcaatcaatattggaattcttaattcaaatgaaagattattttattaattatgcaattccttctaaattttcatttacaatttttacttcattcattcttttacaaggtatattttatgttacattacccggtgtttggacaaagggtcaacctttaaaacatttacatgataaacaattaccatatttttgtaatgcatatgcttcattatacactactttaacattagttttatttttacatgttacaaatatttttaaactttattatattatggatcatttccctgaaattatgtcatgttcaattttctatggttttgtattctcaattggcctttacatttatacattattaatttcaaaagattatcatagaatgacaggtaatcatatttatgatttatttatgggtgccccattaaatccaagaattggtataattgatttaaaaatgttctttgaagttagattaccttggtatactattttattattaggtttatcagtttcacttaaacaatatgaaaaatatggttatgtatcagctgaatcaattttcttaacttttgcttattatgcttatgcaaatgcttgttcaaagggtgaagaattaattgtaccaacttgggatatggcatatgaaaaattcggttttatgttaattttttggaatatttcaggtgttccatatagttattgtcaaggtgcactttatttatattatcatgaaccaagtgaatataattggtcaacaagttatattgcattagtttatgtattattattcatttcatattatttctttgatacaactaatggtcaaaaaaattcttttagaaaatttatggctggtgataaaacagttagaaaaactttcccatttttaccttatcaagttttgaaaaatccttcatatattaaatgtaaaaatggttcaactttattaactgatggttggtataaatatgcaagaaaaattcattataccgcagattggattcaatcatgtacttggggtttaatttgtggttttaattcaattttcccatggtttttcccaattttttattttgttgttttaattcatagaactcaaagagatttaagaaaatgtagagcaaaatatggtgaagattgggttagatatgaaaaagaatgtccttggttatttattccttatgtttattgattaaactacaattatgtctacattttacatttcactttgtgtaatatttatttatttcttaattaactaacaattctatttatataaaaaaaccttgattggaaaataatagtacatccgtataaccttaatgtttcatttgagacattgaacattttttacctgaaaaaagcataaataagtaaattaaaaaaacaattgaaccaattgcagtaaatgaatgaattaatctttgctttttattcattctttgtttcttaacatctttatcaaaatatttttcttccttttcattaaagacaactttatcttcatttgataaatcataaacttcacctaattcataatcttcactaaaatcataattatctaattgatcaacaattgatttttcatcataatatgcacaatcaaatgaaattttcttttcattattaaaagtttcctttgattcaggaattatttcattatatgatggtaaaacatcattatcatgagattcattaacaccaactaagtgagcagatttttccattggacttaaataagtatgtgatggtctaatacacatttttttaaaagcaaaaataaattaacagtacctttagcaactactattattgtactttcaactagaacaataaaatataataatcattgacaactaaattgccaattcatccaaaaaaattaattacagcgattaaattagttttcttgatgaggtcttttttacaatatcgatagttcgttcaatttttatcatgcaagtaatatattattaaacaatatacatctattatatgatagtataaagaaaatacaattcatataatatctattcagttcattgtattaacaaaaaaataatagctttcgatgttaaaaactattttcaattgctatcataataagattaatatgattattatctatcaaaaaaaatattttactttttagtcgatgcgaggttcgaactcgcgaccttccccgtgtgaaggggacgtcgtaaccactagaccaaacaactaaaacgcagaaaaatgttggccgcacaattcctgtagttagatagtaacataaaacaccgaataaaaataaaaataaaacaaaacaaaacaaaataaaaaaataaaaataaaaaataaaaataaaataataaaaaaataaaaaaaataaaataaaaaaataaaaataaaaaaataaaaaaataaaaataaaaaaaataaaaaaataaaacaaaaaaaaaaaaaaaaaaaaaaaaaatgattgaaaaaggggccctaaaagctactacaatcgacgattcaggtcctcccgaccctccaaacgttactaaaccgcccaacttaccccatggtgagtccaacaagttaacttcaatctttgctgaagaaaaagaaaacgaaggtttgaatcaaactgaccatgaaactcaagatgaagatgaagatattgaatttcaagattgcgctgaggaagatgaagtagtccaagaggtaaatgcagaacctcaaccaaccatgacgttggctcaaaaactccataaaacaattacggaggcaaatattacggttgataaagatcatctttatcacctttcatactttctaaaagttggcaaagatcaatttttagaccttgaaaaattacaagaaattttatcctctttcttaaaagaattagaaagaaatattaatactacaaatttagcagaaatgcacaaagagtttcaatttatctttgaagattattacaaaagcaaagataacaacaacaataatattattaaaaataaaaaaatcaacaaagttcataataatatgagcaatcaaattgatgcaccaactgagaatacaatggaagaaggtgcaaacatgtttaatactgataaatacagtttaaaaattaacctaccattggctgaaccaccgatggaattattacaattagtttctaccatgttagtagaaacatttaattcatatgatcttaacttaatggatcaatcttttgaagaaaacaacacacttgttgttttaaaaacggagttccctcctttcatcattaaatctaaatatgatgaaattattaaaaatctctattcagaatacggagaaattatgtcttgtcaattaccacaagaaaaagaatccaaaatggcattcaatatgaagttctacgaacaaaataaaattatttacacagtgttaaaactaaaatcatcagttttaccacctaaaattcattccatctcacacacaacaggtggaaaaacacataaaatccccatcaccacttacttgtctactgcacctacacattgtgtatactgcagatgtacagaccacactacagctagatgtccaatgaaaccaagttgtagaagatgttacaaccctagacataaagtcaaagaaggtgaaattccaaagaatggtcacagagaaattttctgtccaaaatcatcggaggctgaacaagaaaggttatttaattccctccacccaaaaacaagagagaatttctttaaaaaaactctctcaagatcattaccaatgtgggcattgagaattagaaacgcaacggttaatgatcaaatattttacgctcctgttactccaagaacatcaactacaaatggtaatgggaaaagaagtagagcccaaacctctacaaacattttaaatctagatgcagctgttgttatcaataatgacaaagtagattcagatggcttctctattccatctaaacctaagaacttatctaggtcagattcatcatcatcaatagtcagtaacgttgataatgcggtcaatcctttccaagtattggaaaatgtggatgatccagaaattccaaatgaagatgaaaacatccatagtgatgaagagatagaagatatggttgttgaaactaagcatgccgaaactacaagaagtatgccaaaaactccaactcaacctagaaatgtcagaacattagttaaatcttctaaacaaggtaagagtgtagcaactggtacattattagatgctaaaaaaatagaaatggcattagaaagaaaagagaaacttgaaaaaaagaaatctcaaatggatttagactcacaagtctaattcatttaattcttcaagtttaataaaatataaaaatataaaaattaaaaaaaaaaaaatataaaatatcataatgaataagttaaaaattttaaattttaatattcagaaggcaactagtccttctaaattaattcatattctaaattatgcaaaaaataaaaaaattcaaattatgtgtcttacagaatttgatctaaatcaatcaactgaattatcttcaattcaacaattattatccaatttcgacttcaaaattgcgattcaatctgttcaacatcgaacagcaattatttaccattcttcaatagaaatcatttcaaataatatttttccaaggcataatcgtgataatcaacttgcaaacttttatgtctgtgatataacaataaatttcaaacaagaaaacttaactatcatctctgtttatgtaccagtttacaataatgttaatgataacagattccactgcattaacaaaaaagattttattgacacattatgtccaactttatcatcattatctcgaggtgaaaataatctaatcatttgtggtgattggaatacacatcctatggaagcaacaaatttaaatcgtattgaatcatttcttcatcaacaattaatggaaaataatttatatgatattttcttccttccaaataatagaagaagtatatgttacaccaaccacggttcaaatggaacaaataatcggctagaccgtttccatgtttccttcaatctgctaagaaatatcaattttaaatatagagtacatcaaaagctaccgtttacaacacatagaccggtagtatgtacattatcagatatcaattcaaattctaataataatataattaataaagataatttttacaaaagaatatcatcaattcctgattacattattgaaaataaacaattatataaatacattttcaccaatgagattctggatactaaaaacccatcaatggattataatgcatatatgcaaagagtttgctggaaaacaaataaagtaatccagataatgaaacatttaccttcatataaggaaaaaatatcatctaaagaattaggatttgattttaatgatcctcaattcaataatatctcagctaatctctcaaaaaacttcaagagacttagacttagatttggaaaacattcaaatgaagcaaatttggatgaaaatattataaatgatgcaaattcattttattcaaatcttttcgcatcaaatgaaatttattcaaatcaaaatttaaataacaaatttgacaagttcactgaaaatattaaagaacaattaactgagaaagagaaaaatgatttaattaaacctttttcaaaacaagagatatataaaaaccttctaaggctaaatgaaaatggtccatcatcaccagggactgatggtattacttacagagattggaaaaacaactgggtttctgctgctgtgattctaaccaacatggcaaattatattcttcaaggcaatttaaccacaactgataagattggtaaagtattgataaaattaattcccaaaaagagttaccgacaagatcttccattaatagatgatctacgtcctatcagtcttacaaattcatcacttagattaatcaacttttctatttctaatagaataatgcctattgcaaacaggattatttcccatcatcaacaagcatttatgcttcacagaaatattcatttacatattgaaactgcaaggattcttgctaatcaaatcaattcatcaccatcattatccaatgaacaacatatattattagtagacttgaaaaaagctttcgattctattgatcatcaatatcttaaaaagatcttagaaaaatttgggttccctaattcaactattgaagcaactattaaccaatctaggttagcatcggctaatatagttaatcaaaattggatccataaatttaatattccattaaggagaggtgtaagacaaggtttacctttctcacccctgatattcaatcttgcaatacaaccactgattattaaactccatcaatcaattagaggaatgaaatacaatccatacaatgagagaggtttaaatgctaagctttttatcaatattctagcttttgctgatgatatatgtctgtttcaccagaacaataatgaactattaaaatcactatcaattttaaataattttgctcaaatttcggatcttaaaataaatgaaaagaaatcaataatttttattaataataaaggtatcaataatatcaaacaatttgctaatataaatcaattgaagctatcaattttagatatcaaagaaaatcctatctatctaggaatccccttgttgaaaatcaactggtacaataaaataaaccaattgaaaacaagactaaggaaaactatgtttttagatctaaatttatatcaaagagtagtagctgttaatacttacatttattccactatctattattttgaccaacatgatccaattccggatcctcttttgaattcttttgaaaatcatgttaaaaaagaattagttaaatatttaccgctgaaaattgcagttagaagaatcaaatggcatcaacctcacaaaaatgggggtatgggtctgatcgaccttggtaaacaacttcaaggtagaagagcatatttcatttatataacgactattaaacagaagttaaaatttataaatgaacatcctttgacattaataatctcacactcattacaaggaattattaatgttatgatcagaaatcactacgtttatcattgttattacaaatatgttgaaaattacatactatcaaatagagctgtacctggaaacttaccaaaaataaaaataccaggtactatttccaatggattaatttcaacatatccgttcaatcttcttctgcataaaaatcataaaatatggggaagtaatattaccattgaagaaactctttcaaatgaaatgttaaaggttgaaaaacctaaaataataaatgtaaatacagggaaaataataatcgatcttgaaccaaatatcaatttcattatcgaacaccctgcgaattacaacatggatgaagcttcttcaaaaacattagcaccattaatggtgtactctaatattttcccatatttacaaggatggtattatttaactaatattcactcagattttcaggttaaagaaactacagatttcaatgcaacatcgttattttcaatggtagaaaaaaatgttcaaaaatggaagattgtagaaattttcaataaaaatcaggaaatcaatgttgaatcatttaaacacttttctaaaagattttacaaagaagaatttaaaaataaatttaatgctgattattgggatggtaaactagaccatcaactggattgggaaacatgctttggttggttgggtagaatcaccaatcaaaaccatgttgattttaatgaattatttgaattacaaacaggaatgttgaattcccatttttatcacccttgccaattctgcgaaggggaaggtgggactcatcatgtctttttcaactgtaaaggaatcgaaataattctaaaagaattagagataaaaattgatctaaagaatattgttggtttaatatcaacaaagaaagatgcttataaggcaaatataataatcaagttaattatatttttcaacaaacaatgctacaaaagcaagaagaatgatccagagttcaggattaacaaaagatttatcacagatacttatctgttattcaaatatgaaaagtttagttcttattagatctaaattagatgaaaaagattgagaataatcaaacagaaataatttacatttagttcagtatatgaagatatattgaattgatgaagcatgaataatatatgcgtataagtaatcaatctgtataaaattgtatattttaatgaaattaatgtaaaaaaaaaaaaagttttccgcaataaactgctttttgaaggttttattacgcggaactttgatactattgttacaataataaaaattgaataaatataatcagaaaagagtgaaaattataattttgtaactacaaaaatctatcatttaatgtctttcccgtggttatgtgagaataaaaattaatgtattgcataaattaagggttttttattgtatacttgctataaataatacaaataacattctttgtgtgatgttttgtaacagtcaaaaagatgggcatataatggtacataactatgcaatttttgagtatgtctagctttttttaaaactaaaagaattttttattgcagtatatccctatacaaacataaataatacaatatgttagataaaaattacttgtatttttgcttacgtaaacaacacaataacatcctatttaaccacatacttttgacaacaagattcgcccgtgtagcgtaatggttaacgcgtttgacttctaatcaaaagattctgggttcgactcccagcatgggtgcaggcgaaatcttcaattatttttttaattttgttaaattcttcaatactataagaaacttacccgctttttctttaagaaaattgaatttcttccatcaacatgaatttcagatttttcaacagttatctgaaatagatttggtctttttttttgaaaggtttagaatagttacaagggccaaagatgatgatgaaatttattggtaataagataccattcaatcaattattaatacgtcaatattctaatgaagtttcaaatgttagaaatacatttaaggcaattgattcaagaaagacatttttaatggattcatatacaaaattatggcgtgaaaatgaaattgtcctttttgcacatcataataatttattatcaacagagaatgaaaacttacgtaaatcttttaaaaaagttaatgaaaagaatcaagataatttaattgaatttaggaaattaaagggttcaatatttaaatattttttacgtgcaagtgtacataaagatcctgcaagtaaggcagcatttagattaattaaacgtaaaaatattaaacatccattagaaaatttattaaaaggtccaacagctgcaattataattaaaaatttagatcctgcatcagttaaagaagtaagtaaaattttatcaaagcaaaaggaaaaattatttatacttggtggtaaagttggtgatgaatatatgaatattaatgatattgaattatttaagaatttaaaatcattaccagaattaagatcagaattaattggtttattaacaatggcatctggtggtggagttgttagaactttagaaagtgcatcaactgtattatctgcaactcttgaaagtcataagaatgaattagaaaagggtgaagtaaaggaagaagaaaaatagaatagattttgattctaaattgtatagagataactgatcttttataattataaagcctgtaaataatactattattcgagattgaaaaaaaaaattgaaattttgaaaaaaaaattcataatttttcaaaaacttctttcatcaaacaatgtcagaatcaacagaatccactatatctaaacgtaaacaatatcgtttagctaaacaagatgagagaaagaaaactgttaaaatagttgaagaaggtaatattgaaaaagcattaccaaagaagagatattatagacaacgtgcacattcaaatccatttagtgatcataaattagaatatcctacaagtccattagaaatggattggagtaaattatatccagattcaagtaaagatgttacaattgcagatattggatgtggatatggaggtttattagtttcacttgcagaggaattcccaaatgaaaaaattttaggtatggaaattagagttcaagttactgaatatgttgaagaaagaattaaagcattacgtgaaaataatggtaataatggtaaatttaataattgtgcagttatacgtggtaattcaatgaaatttttaacaaatttttttaaaagaggtcaattaaataaaatgttcttttgtttccctgatccacattttaaacaacgtaaacataaagctagaattattacaaatactttattaagtgaatatgcttatgtattaaaagaaggtggtataatttatacaattactgatgttttagatttacatgaatggatgaagcaacatttagatgatcatccattatttgaaagattaagtgaaattgaggaatcaaatgataaatgtgttgaaataatgacaaatgcaactgaagaaggtaaaaaagtttcacgtaataatggtagtaaatatattgcttgttatagaagattaccaaattctatctaaaaataaaaataataaataaatgaaaaaaagaacttatatatcgatgtataatattattaaaactataactaactagtaaagaaacttttaatacttacagaatcattagttgttttatgtttatgaattgaatgtaacgaaggaatttctacatcaattgattcaacagaattaatcattggagttcttgcattattattaccatcattattattaactaaatcatttgaaaatatttgttcaatttgttcaagtgaaattcctttagtttcagggtatataaaataaacaactaaaattgaaataatacaacttgttgcatgaattaaatataatttccattttaatttttctaataaaattggtgtcatttgaccaacaataaaatttgaaatccaattagttgaagttgcaagtgatgaaccgaaaattctagcattatttggtaaaacttcaggtccaattaaccaaccaattggaccccaagaaaatccaaatgatgcattataaattataattgataaaattaaatttaatgataaattaaattttgaagaaattgaaattgataaaagcgaaattgccattaataaacctcctaatattaataaaggtttcctaccccaataatctgataatttccaaggaattaaagttgataataaataaataattgaattaatacctgttaatttaatacaatcagaacctatccaaccctctttttcaaaaattaaaggtgcataatatgatataacattaataccattaaattgagcgaaaaattgtgctgaacaagcaataaagattctcagaggatattgttttaataaacttaatggactattattagtattattatttattttagcaagtaaaatactttccttaattgatttaaaatgttgaattgatatatcatcatgaacattaccatttgagaataaatcagcaattacaattaaagcttcttcatcatgatcattttctaataaccaacgaggagattcaatcaatgcaattgtaccaattaataaaatgaatccaaataaacattgtgataataaaggaattttaaaagaataatcattttcaataaaattacagaaataacctaaccaaattgaagttgaataacctacaatattaccagtaaattggatacaacctaataaacctctttgatttgaatgtgaaatttccgaaatataagttggagcagttgaagttaaaataccaatacctaaacctgaaataaatctacctaaacaaattgtgaaaatattaaatgagaaagattgtataaatccaccaaaaatgaaaaataaagccccatattgagttgatttacgtcttgaaatactatgaaataggaaagagaatgataatgaagataataaagcaccaatttcaagtattgaaacaattaaaccaatttggaaattattcggatagtcaaatttctgtcgaaaataaggattaataataattgaagagaaataaccttgatcataaccaaataagaaaacacaaattgatatgaaaacagaggtgtaaactaataatggtttaccaattagtacagattgaggtatatcctgttgagtaatcattgtttaaccacaaagaaaagaagggatgtgttgataataatctatctatacctttactactcacttatcttaatagtaaatgaaattttatcctctagtgcgtaatcatcccccacttcattattgttattaactgtgacgtcaattatttccactcctagacactgtaatacaccttcaattataccaatatgaaactccaaaaaggtgtttgtatgtggtgatgattcatttattggtattatacctgaataagctaatggattattatcaattataacataagtacctgaatgatttgtacgtaaattatcaatttgcttcccaaataataataaccatactttactacacaagaattttaatacatctaatgaattctgtggtggatatggtaatgattgagtatttgaaagtaatatagttgatttataacctacatcaaatccaattttagataatcttgatgagggtttacttgattggatgttatataatgtagattgtgataatagatgatgtaatgctcttgaagatacttgatgattgttcattgtatgtatgtatgtatgtcttatatactatactctctatactctaaatatacaacttaaagtggcaaaacagtggtaaaaatgggaaaatgggtgaaaaatttaatttacagtgagggaatctcataaattataaattattccttacaattcctttgagagcctcctgtgcatctctatttcatcttccatcagattattaaatacatcaccaatatcttcaattaatgattgtaatctctcagctgattgtacataatgattagaacaaattgtatcaatttctcttaccatatcagaaactgtttcaagactattcctatattgaactaaattacgaattttacccctacgtaattgtgtattaattatttcactttcctttaatgatgaaacagctgatttatattgcaaatcaaatgattttttcaattcttgataatcaatttgatatcctgttttaagattatttaatttatctttaatttcatttcttgttttatctccaatatatcgttgttgaactgcagttaattgttgataacttgctgatggtataatatttggtgatggtgatgttttagcaagttcctctaataataatcctaattgtccatgtgcatcggataaattttgtgaatatgtaccaatttgtgaacataatgattcaattttatttattgtactcaatgtctgttgttgttgtgttggtccaactattaatgatggtggaattgatgtcagtgataacgtatcaggtaatatcaatggagctctaggtgatgatggtggttgttgttgttgatgtggatgttgttgttctagttcactttccaatccctcctcttgttcgttatctttaattgtttcttcctcaattacctcatcattatcattatcattctgttccatctcactctctccattgacatactgcacaaactctgataaatgtggtggtactactgaactgtccattgtcattgtcatctgtattgatagttgataattgataatataaattactgatagctgctataaaataacagagtgaatttattaaaatttaatttttttgttaaggcgcggtattaggaaatgaacgaagggccgtttttcattttatacccttttttgttcactgttttgttcactgttttgttcaccattagacttcataggactaaagatgagtaataaattacctactgaggtatggatgaaaatagctaatttcatagatgaagaagaatttcatgagttaagtaataaatatgataatttatcatcaccagaatttgaaaatatttggaaaaattatatcaagaaacattattttttaactttctatgattatactactatgcaatacaattgtcaagaagattatcagttcaatggtaattcatattatcaattacttttagaacttcaaagagatgatagttttgttaaagatttaattgatttatatattatacttcttaataatgacacaaatacaatgagttcaggtagtctaattgaatcaatgaataatcaattatacaattcatttaattattatttaccacaattaatgagagaacagagacatattaaatatagtgattataaagaaattgatggtaaacgttatattacatctaaaactttctacaatatattaaatgataggaaatctaatctaaagagaatttatattgcaacaaaattaattgaatcttttaacgttcaccaaatgtatggtagttttaaaaattttaaatgggggtcattaaatgataataatcgtggtaatgataatgaaactttttattttaaactttcaatgattgatccaatgttttatgatagtattataacaagacataatgtaattgctaaaactttgaaaaattttaaacctgtcgaagattctaattatacaccacctgcatcaattcaagtatcaaatttaacaaaagttttattaaaagaattgaaaaaacagagaagtttccacagaaatgatgataatgatactaaatcagaattaaatttcccatcaccaatatttttatcaagaacttatatgggagaatttgatttaccatttagattgattccattaattgtaaggaaattatgtaaaaatttaggatattataatcgtacaagattagaggaaggatttttaagaattttaaatgaagataataatagtacatatattttaactgtaataggagaagaatttagaagttttggtcatcatgcacttaatcttaaaagctatgttgaatatggaccagatgaatcgacaaatgcaattaatgaacaaggtttagattatgaaaattattttaataatgaaaatattattgctaaacaaggtgatttaccaaatttaattaaaattgaaaagattgaagtgaataatgaagaatttgttattgcaaaatctaaatatggtttacagagtgaattaacaatgattggtaagaaaattccatggaaattgtttaatcaatggaaaaaaatgacaatttatagagttttccaaccacgattgattaatttattcaataaatgtttatacaaggatagtgaatttaatgatgatttaaaggatgattggttttcatataagaatttaatatcaagagagagaatttgtgagtttaataattcaacagttcataaatttgctctgaaggctgaatatgaaagatatggtaaatatgaaattggtgaaattgttaaacttaatacaggtaaatttggtgtaattactaatataattgcaattaatggtacacaaacatctgaatgtattgtacaatatttaattcaaatagatgcagatactgaatattcagttagaggtgattgcttttctagaaatgatataaagggtgcaattgataacttactaagttttgatatctggggtaaatggtttacaggatttgatggtgaaaagttttataaataaatataactacctataaataacactatttatttccaattacgtatcatttccacaacatcatccctccaggggacattctcctgtactttctcttcactatgagctactctaatcctattaccaggtacttatctcccattcatcaaagttatcaacagctaaaacagctgaacgataatcttcaaatacaacaagcccccgtcgatgggtctgtggcttggtattgttattattagtgtttctatataaatgtacgtctttaactacaccacattgtgagaatagtatgagtaaatcgccctctgttacttctaatggtaagttggcaatacttatagtagatgtatgagaatatgagttatgccaagatgcattgattggtgtctttaattgtaattccctctcattgattctactcgtcattgaagtattaagagtagttaataagaaaaagtgaaaaatatttgatttttcaactcgcttattggtatatacacttgaggggaggtctacatgaatctttatatcttctaatctttctttttggacaatgatttctgcagctattagagaacttagattcatcctaccaacaacatcttcacctttaaagaaatttattgttgaagtatatccacaaattaaatcacaaaatcctcatttaaatgttttagttagagaatctcaaggtgttaaaccaacaattgttgctagacttgataaaggtgttgaagttgttaaacatgttgatggtttctcaaatgctgaattaaaggcattcctttctaatccttaattaatgggaattaatatatttttattatattatattatataacgtttatttattctatatacaaacaaaaaaaaaagatttaaaaagatacaaataagtatagattacaatcatttcttcttttcaataataacacgattacttaaacttttacgtcttgctaattcaacaccttttaatgcttcttcctctctctgtgcacgaattttattattctcttgcatttctttccatgtttgattaaaattatcaaacatacctccattaccattaccaccattggctaattttgctgcctctaattgttcctttgttggtaatgggaacatacccgtccattttctaaaagcaacattacgtaacaattgggattgaataattgaacaaaatccattaactgaaaaataaatcataacagctgcactcatattccaagtgaaaataattgatgcaaatggtaaaatcatgaaaactttcttcattttacctgaactaaattgtgtattacctgtatcaccaccaaatttaaatgcaattgaataaaatgttgcagataataattgtaatccaataaaagaatctggcatacttaaatcttgaaaccatgcaataccaccatctttaaatccatcaattggtaaattactcatttctctaataccaaagaatgcaccaactgaataaaccatttgtgtaacaggtgataaaaacattcttgaatatttaacaccatttttcttatttaaaacacttaattccatttgtttacgttgttgtaaagctctatcaccttttgacattgcagctgtcatttcttttcttaattttttagtttctggcataatatgttgagatcttgccattgtatcactacttttcataaataatgggaataataacattctacatccaacagttgtaactgcaattgttgcccaccatggtaaaccactgaatacatgaacatattctaaaatttgttgaattatatcacttggccaccatccatcaactaatccaacacttttcaaatatccaatttcattactatttaataatgtattatttaataattctctttgactatctaataattcatcaaatcctaaagaatcttcaattttacgttcctcttcattaataatattttcaatattatgtaaaattgttgatgttgtacttgaacctgtactatcacttgcaaatctaataccaatttgtgatttaattgtcataccattaaaacccaaagttctggatcttaatggattaactcttattctcatagcaggtcttaaaacattcatattgtcccacttaaaaggaagaaataaccattagttgttgtaccataataattatttcgtccatgaaaaatttcattcactgcgctttaacttctttctaatataaagctctttatatgaacaactacacgatatatgatgataatactaaggaaatatagtagtaaagtagttggagagttagttaatcatcctgtattgtatatgaaacatttggattcattaaatgatgtatcgaatacatcaatttcatcaaatgagatttccaaatatattaaatcatgtattgatcaaaggaatgatgcaatgttaggtaaattatttgaaaaatatatactctatactggacctgatgaattgattaagaaacctataattgaattaaataatggacaattattcaatatgattaaatttttcaagttaatgaacaatgttaaaatgtattcaaaatgtgttgcatattatacaacacgaatatcaaaggataaaaataaattaatggaaatacatgaaaatagttttagggataagattgatatttatataaataaattaggtccatatgagataattaagaatggaatgtttacaaaatttcaaatttataaacttcaattaaataatgatgatacattaattaatgcattgagtatttatttcaatgagaataagataattctaaatttgaaaatatgtaaagaattatacttaatgatgcatggaatcaataccaaaccatataaggaagaatattccaagacacttaatccagatattcaaatggcaagaatttatagaagtacgataaagaaaacagagatacctgatccactcattatagagaaatacaatgagataataaacaattccgacaagaagacacatctacgacagaaacttgatcataatcaacaaaaacattcatcacctgttccatttcactgttatccattcacacttatactgaaactactattaaaagttgaatttacaccagaagttccagttaaattattacaatttatagtaatggaatgtggtattaaaccagacaaaccatcactgtcattaatgggtcaagtactgcgtaagacaggcaatgattccatggccgatatgcttgataacctgtataaagcttagtagataatatagatagatagacgcgtcatgaatataatataatagagaaaataccactgtttatataagcattttcattttattgtcttgtgatggtgcaaaataccacagcatggaaaggcattatattggttcaactatagcatagttggaagtgtagtatatccagtaactactagtatgttatttctcttggataatgcgtttgcttgtcattaatcccaactctacacagtctatgactgattcacttgaaagtgaaattaattcattacatttatcatcaaatataattgtagattattatactgcaccggaaaatgcaccttcatcaattaataatgatttagatgctgaaaattcttcaaatgttgttatggaaaatttaagtgaagattatttaaaagtttatgatggaattttagttgcttgttatagtgatcatccattaatttataaattaagatcaattacaaatgctaaaatattgggtatttttcaagcttcaataatttatgcattacaggctattgataataaatcagataaagttgcaatattaacatctgttgatgaatgggaacaaatattggataatgcaataattaatttcttaggagtgggaagtttccctaatgatagatttgttcatacattagctgcaaatttaccaattttaaaattacatgaaccagataattacagtattttaatggggaaaattcaaaatcttgttaataaaaatgttaaaattattttacttggttgtgcaggtttatcaacacttgattataaaatgaagaatgatttccccaatattaaattcgttgattctgttaaaattggtataaaacaacttatttcatttattgaaattggtaatgtataaataaaaaaaagtttatagaattataatttcttaattaatctctctaatgcattctttaactcaactttatcactctcttctgcaattattggttcattattataataattcacaagattcttcagtttttcaaaatcattaaataatcctggtataataacattcctttcaaccatcattctctttaaattattaacttcatcagtttccatcttatctgtaagatattcaattaattcaatcagcggttcatctaatattaatcttggttggatcaaataatgtaatttatttgaaatactttcaatccattcatttgttaaacttttaaaatcatcaaaataccataaaagactagttaattcattacctgtcttttcattttcttccttatattcaaatgcatgttctaataaatctgatgatatattttgataaaattctttcattttgttcctattttgataaactaactctttcagaaattcaaacttaaattttgtatctgaaactataagtatattagtctgtcttaaaatttccattatttcatttaactttctagtactggttaagtactgtaaatgattccaaatattaacttgatctttcaaacataatttatatccatgtcttatttctaattccttaaaatcaccatattcaataaaatcagggaaaaatctccaaatattgttatcatcatcatcatcaatatctgatgataaaagggctgcaaatagtttagcatgatctaaaacatccaaacttccctcaatgaagaactttaaatgttctttattaagtaaattagtaaatttagtaaataaacattgttcagatccatcagttttgaacaaaactagattcatcaatgtgtgtaacccttaatatagaactttcatcttcctcatctacattgtgtaaaaataaatccttaacttcatcatagacacggtctccaccaacataacttaaataacttattaatttgatataaactgattcattacccacccctctaataaaattaagaaataattctaaactttccctatcattgaatattatagcaggtaatgaaaattctgattcatcaaataaaatattaacaactgatttaataggtctcatattaccaatgatctctgcaaatattattctcgtttgagttgcatcacctgcttttaaaaatgaataaactgttttataaaaatgaccgaaaagatcaatccaatatacatcttttagtttagataatggttgagttatgaatgaaagtttgctttttagttcatcatgagatattttgtccaattcaacatttcgaaaactatctattaatgggagccaaagttctaacgattccctcatcttcatgtactaaagtttcataaacacttttaaaatttttaaataatggccatttttcaaattgattacaattatatgaaactaattgaatcaatttactccacactctaccacattctttgtataatttaattttgggttgagttaaatacttaagtgtttcgcagactgcttgacttatagtcatatgtttaccaccctcctctaatgataatgatgataatgttggttcaagttcttcagataataaatttcttgtgagtaatttatttttattgtttaaattaatagattctaataaaattattgcagtatttaatattttattatatcctggtacatcagtgtttattattgaataaagtaaataatttattatttgataactacatttatctaataaatgaggataaagcattgaaaatcttttaattatattaaatttttcacaaattattgaacaacttgggaaaaatttcatttgaattaatgtaattgtaaaattctcataaagttgacaatatcttagaggggttgttctaattaattgaaatattggagatgttaaagattttgtaatattttcatttttcaaaattctaccacatgtttcataaatatttttcatttcaattatttcagttgttaatggtgataataatgctaaaagttttaatgattgtgatgttgtacgtaatttgaatggatctaaaccattcttcagttcaattacaactaaatctaactcaaatttaacagatttaataatatttcttaaaatgtttggtgtgaatatatttgaatctattgatttcttccttttaatcaattcattaaatgatgcataaacttcaaattttttcttaaaatttttattaattaatccagcggagcattgctcaataactcttggtatttcaggataatctgctggtattattaatgaaaatcctcttggccaagattcattcttacctaaatctaacttcaatatattttcaattgaatatgcatcaatattattattttcattatatgtacttttcaaaatagattttatattaacattatcataattatttggttttataggtgatgataaaataactgaactttcaatatcacttgaaaatacaacacgttttttcattggtgatgaactgatatcccccttattattttccttaatatcttcctcaatatctttacttgtagtttcattagaatcgggtatttcaatggatatatcatcacttttagatattgaatcaaacatattgatggatcctgcctttggtttccttattttagtgggtgtatttgatgatggggttgatatagctccaaatgatgaattagatgtggttattgtacttgaaattgaagaacctgaatcagttattatttgtgtgtccattaatggattgacattattattattcgtactatgattcaaactctctttgagtgctttttttggagaatcagggaacaatggagtcagagtattaagtaattgattaatagttactcttttatttgaactattatttcttgatttatttcttggtgatactgatgatgatttcctcaaatcatcacataatttttttcttggagagagagtagtagttttatttctttgtttccttttcaaattagcaacttgttgattcagtttattaacttcatcttctttattaatttcatcttcgttaattaaattaacatgatgaggtgaaataggtgatgaatgtcgttttaaaagttgataatatgcgggatctgcatctctagatatttgaccaacactagaatcattcattgacattcaatattgtgatcaaagagcaatatccaggaattaaatagaataaaacaggttatcaaaaaaggtgaaaattcatgtcattaagaaattgaaatggaaattaaaaaatttaacgcgtagcgtgtgtgctctctataaaaataaaaatcaacgtccattttatttattcactgacacctaccacttctccttttgatcagttcttatatcactgactgactattgccttagacatagattaaacctcctttagcttaaccctactcagacaccaattagataaatcacataatcttatacccgatcaatcacgaagcatcagtttaacgaaaaatcctgcaacctactctaaactaagcaaatataaacccaagtattagaacgaaacatcatctgaattgattagtagtctaacttggtaagcttaaggtatacgttattctaaatgatgcaaaagatttcggttctgatttttttggtaaacgtaatctagtaaaacaaagctatttgagaagttaaaaaaaatctatgaatcaataggaaacagagattttctagaaaatatttattatctttcaacacaagtttatcattggtgttgtttttaaaactacatgccatgttaagttttgtctgagttaatatttataaaccgttttatacatggtaaaaagaaatcttgaaactaacagtcctaacagtctgcacttaagtccataaaaggtcaaacttaaatgagaaactttaatcttcttaactgatagatcgactctctttttgtatgaatccattaatttaacttttcaaagtgtactgtaaacgtaaataatatttcggattggaccgaactctccaagaagatcaagaagagtatacggatgaaattttacaaaaattgttaattgattctagtgctgagaaaacagtcctagctatagatcttgctttcaaaattgtttgcaaactacttaaaaatgaatcagcagaaagatccaaaaggaatattgagatttatttatcaaattgtttgaaaaaccaaaactgcagagatgtattacaagcaattaatatctaacaaacatttttgcaacaattctccgtgccaatcaatcagaaaaagttttttcaaacacggaggtggtctcctctagacgtcatgaggcaagatcaagattaaaattattaaaagatgataaagtaaatatgtgcacaacaattcaaactggactaaaaccaaccagtactgtttctgaatttgcagactatggaaatgagcaatttgcaaagaagattatgaaaaaggcaaataacaaacttgattcctctgtagtccaagaagcacttgctgaaattgcagaaaatgtgggaaaattaagtaaagaacaattacaattattaccatgtatgttgtttcttactgacatgattaaaattgtccccgaagaacaccactcaaaattagcaaggcaattagtaccagaacttaacaaatgctctcaagcagcaaaaccagatgttaccacattagctgcgctatttgttgaattagaaaaggaaggtaatttaaccaacccaaataatctagatgaaacgggtttaagattcgataaggattgtaagttcgttacaagaagcaccaaaagtgcaaaacggaaagcttccgatgatggaaatgaagataaagaaaccaaaaagcaagccaataaaatcacaatagcagtagcagcttttcatttcaaacctcgtccactaaacatggagccaccgaaaaatcttattaataaagcagaatggtgtaaaaagtgtggtacagttcaccctccaaataaacatttatgggaccctgtcactggaaaacctaacactgcaagtatcaaacgttttgggtataacgcaatgaaattcgaaaagaacaataacaattaacaacacggggtcctatcagaaatttatttaaattttatagttcttagtaatttaataacttcacatgagattgaacatggagacaccaactccaagagagatgaatcactctctaaactggtagaagagtgcctggtttcaaaaccaaaagaaagaagtgtatgttaaagtggaataattatggtcactgtgaaaataaattggtcgcacactatttaatattattacgtaaataaatcgatcttacacaagggaaggttatactttagttgtaactaatccaaaatcttgttcgtagttaggaaggattataacaggtattctaatatagaattcattaacattagatatattctctctagcacggaaaagaattgatccattaccatcaatgaaaatttgatttaaatcatatgatgttttcattgctgtattcaattcattatcagtagtattgctattatcattcttattattggaatacgtatctgatgtaataaaccttatttgaagataatatttatttgtaaaaaaattagttttaaattgagattctgtttcaattggaattaaaacatcagtatttactgaaaatgtattaaaagtagttaaaactttttcaaataatattgattctaaaatattattatctaatcttgatgatggttcaccatatgtaccttttttcaaatattcatctttataaaatatttgatgttttaatagttgaatttcaatacctgttgtttcatatctatcattttcaagatttaaatttatattaatataatcacctaatttgaaaactgcctttttcaataaaattgttgcaattgcatcattattttgtttaatgatatattttgtttgttgttcccttggtaacaaatgatcatattcaaatgtatcactcaaattttcaactaaatctttttgtctttgtgcatatttataatctgataaaatttccattaagttttctctaaggttaaatttataagattttttattaatcatacttttatcaaattgttcctgtatttgaataatgctatttacatctgatttatccaatgaatctaaaattttgaggaaatcttgaatatcttcatcttccagtactgatggttgcgataaacttaaattactcatattcaatttactcttatatgttgaattaatcgttgaatggaaacttgaacttgaacttaatctgcgtgattcaatcctcttttttaaattccaaaagctaattcttctaactgagtttctgtttccattctttaacgtggatgataattgatgatttgatatatcttcaataactaaatcttcagtaaacatatttaaatttgatttttgtaaatgatatattggttgtctaccataattatcaatgaatggttgaatcttaaatggaacaaaaattgttttactaattatatttttaccttctgtttcttgataacctaatataaaattataactaatattgactgcctctgtagaataagttggtggaagaaatttaggtaatttacaattgatataaaatgacttttcactaagactttcattattatttggatcaaattccagttcactaaatataatgttttgatttgaactatagaatgggataaatttcatatgattttcagttgctgtatttatatccggggaactcatttctgtattatacaatgtattcaaaccagataaaaaattagaaccatcatcatcattatcaatatttgaattcagtccatgtatacctgcaaatttcccctctattattgtacttttctgtaattctttaaataatgaataatcaattatagtatcattaattgtataatgacctaatatttgtccataaccaagaataagagatgttacctttgtttcctctacttcatctaattttgtctcatcattagtatctttattaaaactatctaaaaataatgatcttgttgcattagataattgagtggacaatcgactaccaaaccaaccaccagttgatttatcctctgatgatttatcctcaactttctcaactgatttttcaactggttgttttggatctatattattactactattttcatcttcattctcttctctatatttacttctgtatttgaatttgagaaaggatcttgaaatggatgttttgaaagtcatatctgaaatatcgtttacatattggaatttcactaataatgagaattcatctgttcctgcaaacactggattgttttcataaatgaatgatactttaacattatcattgatttgtctcacgtaagttctgtgagtgtccattgattgtttcaatgatatagatgtcaatgacagtgtttaatcaatccagtattgattcgaattcaaattcatgaaaacaatagagaagttcgccttgaaaaacaaaagcaggtgattatgtaatatggttgaaattagaattgggagccaaaatgtattgtatagttttaatagtagtaagtagagtagatgttatatagtctttacatagtgtttaaggagtttcacatagtatattaaaatgaagaaaaattggttttactatatctgtaaaaataattgtaagtttatgaattatttgaaaaatttagtatttaagaaataatttttctctattaatcactatttcatcactcaactcccacatgacatcagtaatgacttcaatacatcaaaaaaacaatcttagatgcacaaatacttactgaaaagaaccaataaccacaaaaccagacaaatacatgaaaaaaatgagtataaaaaaaagtgttgatgaaaagggaaatttctagtttcccctttttgctctcatcaaatgttgaatacattactctcttttctacacccaacaaagctaactttgcttattataagagtaactagtggtcagatccagccaagtaataacagaagtaaatttctatttaactattataaaaaaaaattccccacaatagatgagtctttatgataatgttgtaagttatagagcaccatctcaaatatggtgtatccttttattaataaccttctcatattattgttatagaaatatatatttacaatcagagattggttttaaattaccacctgttaatttaatttctgcattgaatagttttggcatatttgctgatttaccatcaaatgaaaggtttgacctttacgtaaatttagctaaaactttcgatgcctataaagatgattatatgaatcattatgaagattatttacttctgattaatagttatttaatattagatgaatcacaaattgcattgaaatattatgcttataaattttatattaatgaagaatatgaattaaatgataattttgttttaggatctccgattgttgaattcaatttgaattttgattcggaaaataataataaagatagagatttgaattttattaacaaacattatcaactttttggggttaaaaataataaagaaagttgtgaattatttttcaataattatatctatccattgttcaagtcacaaagtaattggaaagaagttgaaattgcaaaatcaatgtctcaagttttgaatcattggactttggtcaaaagattacaaattacttgttttgctttgtcattatcttttatccttttttcaattatcactttcctcatagcaaaaggtaaaccggaaagtttatataagacattattgggttatactattatgttcttatattcattggcctatatcactacggtaatattagctttcatttgtgtctcaattacaattgttacttataatatcaatttaaattttgaagggttacataatacaagttttaatgttttacaaattggttggttattatttattggttatatttcggtattatgggtatctaacttcatcagttgtaataatccattgaataaattaaataatgatgatgaaaatgataatttaagaagtcatattaatgcattgatgaatttatctgttaattcaagtgaaaaattatcacaacctgaaattacagagtctatgaatgaaaaaggaacaacaaaagtaacagaaaacattgttgaaaatggacaagcaaatgatgctgataatgaagctaatgatgaatttgaaactgaaaagaattataaggttcctattttaaaaagtgcttcaattgcattgaactccagtattaaacctttagttacatcattgaaaagattggttacaccaaagccagctggtactgcaattgattttgaaaaaatagatgaagaatttattaactatgccaatcttgatacatcatttgaaccatttaatgaagaaaaaacagtatctgatgttgtttattatttaccatctggaaatacaactaataaaagtccaacaacagaaattgataagatcttcactaaagatgcatttgaaaactttaaagctttgaatttagtttcatccttatcacttaatcatcctgatgtctcaccatgtgatgatggtttactaagttataactcttcttcaaattctcctcaaagtaaggttaatgttagcggtataaaaaacagttcagagcaaaattcaattatgcaagatttaaatagcaaacgagcaggattctatcaacatgcaggattatctgttaataataatagctcaaatagtgagaaagttggttgtaatagtaataatagttcatattcaagtaaaccaagtgcaactgattctggatataaattttattatggatcgaatactaaagaaattgtgcctaaatcatttaaccatgttggattattaaaatatccaattgaaaaattaacaccaatgagtggtaaagattcaagtattgaatgggaaaagaagtttggactttcaagtgcaatatcggaagcagaaacaattcaacttgattctgttcatcaaatagacactggtacaagttcaagtttgaaatcaagttataaaagtaagttaaacacaccaaatacaaaagaaaaagaaagagagacggaaacttccagaaactcaagaaatcataataataataataataataagagtagtcatagtaataataatagtccaaaaaacactaatattaacaatgcttcacctgagaagaagccaaaggtcaagaaaccaaaggaaagaaagaaaagtaattttgagtatttcttaccaagtactatgcaatctgaatttacgcaatcatcagcagaaatcaccacatcagataaagagcaagatattgaaagtggacaattagagacacaatcgatttctgaacaacagactggtagcatgttttctattgaaagagttgtaaatgaacatcgtagaagtatgtaaatataaatttgtaaaatatatactgtatagatattattattattagattcttttcaaagtcgttttaaagttaaagttatgaaaaaagtttctatttagaagctaagattgaatggttcttaagtgattcaagattagaagaagattatggaatagctaaattaactccgagtgatgtttaattctctgtacttaactccgtgttatcatttacaaatgttatatttctggtaacacctacaatttcaacgtgttatgcctgatactgtctgttttgactgttaagtattcactatataggtatccaataacacaatctcatacaatgcgtttgatgattctgaaccatcggaatttgacggaatccggaaatgaattttttttttacttgatgataattttttctaataatataggtttggtgatgatgttgatgttaatgatgatggtgatcaattgataaggaccatatactagatcattgaacccatattatataccccctataagatatgaaatttcctcaaaatatagagtttgatgataaattatgtcgacttcaaataaacaatctagcgtaaaactaggcccatggtacaaagtgaatgtaaatttcatattggacatatttatagagagattaaatatcaatttgatcaaattaattttaaactaaaaccttctaatgcaattagtgatattcaattggattctaatttagaaaaatttatgaatgatttgttcttagagacaaatattataatgaatacaccaggtttaattaatactttaatgcatgaatgtattaaacataattgttcagctcaattcttacgtgatgttattgatcaatatgatagtaatggtgaagtatcaggtatgagattattagtttcaatgaatagattaagaagaggtatttgggaatataatatacttgaaagagttgaatgtattgaagaaaattatttacattggtcatttcgtaaatgtgttttcgaaatggaggcaattcatgaagttaaacctgcattatttaatagaactacattggttactaaattattatataaggctaatcatcatcaaaaattagatgaatttgcttcaaattcaatgctcatatttgatatgttacatgatgatttcttagaatctaactgaacctaatgatgtattaggattctcatttgaattggttcattcttcaactttattagattgtatcaaaagtttgggaattgatatagattcagaaaatattaactataatgatgcaaagagaagaaaaattcaataatctgatattttagagaatataatattatgtttatttatttctgtttactaatgtttgtttactttatttatttatttatttatttttatgttgtacaaataatttacaaaaggttatgcttatatatttttagtttcagttctatttaattgtttatttctgctgcggttgcttcttcattaccttcattactttcatcaatttcgttaacttcactctcaacttgatcagacgcttccttaataacaaactcattcatatcttcatcccattcaacaattggatcagcaattttatcaccattaggtttcaataatccaaatttaacatcaaattcactataatcaagttgctttttcatataacctaaatacattttataagcttcaccttcaagaaccattgaatcagaatataaaacagatgtatctaaattgtaaagtcttgcatttttgaaaattaaatgaacatcaaacataaattcatctaatgaattataagtccaattattcattcttctcttaactgtatcaaatgcaattggatttttaataataacataataatcagggtataatcttttctgtggttttgcattgaaaattttacataatttcctacctgttggattaacaaaattttgaacgtgattaagaatttcaaccatttgagtttgtaatgtaacacgatcttcaccaaatggttcctctgatggataaatttctcttgataatggtgttgtaccaaaattctttcttctacgaactggtggtccactaaaagtattttctgcagtttcagatactggtgttgcacctttagatggtttctttgatttctttaaactagtctttggacgttttaaagctctattttcttcatctaaatcatcatccaaatcttcattagtttcttctaatccatcaacaccttcttcatcattatcatcaactttcttattactacttcccttcttacgacctctctttttaggctttttattctcatcttcatctaattcattatcttctgcatcactaactaaaccatcaatttgtctcaaccattgttcttcagttagattttcatcatattgagtaattttacgttctctagtaccacgtccatatgcatctaaatcttcaactttctcttcctcgggttgaatttcttgattataaacttcaggtaattcctcttctgaatataatcttggtaaattagagttccaattcttcattctttcttcatcaatctgtctgaaaatttcaatttcttcttcagttctagctaaaatttcattcaaatcatcatcatttaaatcatcatcattatcatttgattgttcctcagtttcaatcaattttcttaataatgcttcttgttcttcagcagtagatttttgatcaaatttaccagcttgaataactttaccatcgatatctaatttttgatgtgccttctctaaaatatattcttcgattgaatcacttgtaatcaatcttaaaattctaacttcattcttttgaccaatacgatgtgcacgatcttgtgcttgtaaatcttgatgaggattccaatcagtatcaaaaataataacagtatctgcagtttgtaaatttaaacctaaaccaccagctcttgtagataataagaaaattgaataaggagaattttctgcattaaaatcatgtaataaatcttgtctatcatctgccttagtatcaccatctaatctcatatatttaacatcacgaaatcttaaaaaatcttccataatatccataatttgagtcatttgaaagaacattaaaactctatgaccagttttagcaaattttggtaaaattctatccaatagttcaaatttaccacagactctccagattaaatcgttattttgatgtgatggattaatcatatcttcaatatcttggaaaacaaatggatgattacaaatttttcttaattgcattaatttattattcatacctttaataccaactgcattattatctttatcaccaatatataatttattatatttaagcatttggtgatacatttttgcttgtaaacctgactttttacatttgataactttttcaattttatttggtaatgatttttcaacatctttcttcaatctacgtaaaaggaaaggtcttaaaactttatgtaatcttctaataaccaataatgtttcttcttctgataattcaattttatcttgaccaccagtattagcaaaaggtgtgttaaaccattcatcaaaggatttaacagaattgaaaattttaggtaagacaaaatttaataatgcccataattcaggtaaattattttgtaatggagtaccagttaaaattaatctataatcagtatgataaaattcatttaatgtataagataatttagattttgcatttttcattctatgaccttcatcaataatcatatgaacccatttaattttagataataaatatttatctttaataatatattcataagttgttaataaaacattaaaatctcttgccttaacacgttgagctaattctttacgatatgctggattacctttataactaattttcttcaaacttggagcccatttatcaaattcattattccaatttgataaaacactaagtggcacaataactaaaaatggaccaggtaattttttaacttctgtaatataagttaataatgaaattgtttgaatagttttacctaaacccatttcatcggctagaataccattaagatgattattatataatgaaaccatccattctaaaccacgaatttgatattcctttaatgtaccaccaactaaaattgaaggttgttgagtaactttttccttaattttatgtgcaacatgataataatctgaattttgctttttctcaaattctgtttcattaccatcatcatttgcaatttcatcatcattgtcctcagtttcatctgtatgaccaactttaaccattttttcatgggtttctctttgttgatctttaacagcagctgttaaactacttaagaaagaattggtttgattaagaagatgagtaattctagtatccttagtttgatctaataatttaacataagcttcctcatcatttgcctttaaagcttgtaatctttgttttgcatttttctcaattctacgttgttcttccttttctgcttgttgatgataaaataataaatttttagctaatctttgatattttgattttttctccgataagattttcatatgatcactcgaagctgttaataaattagcttgtctttcaataacttgatgaattttcttttctgattctattttcttctgttcatcatataatgcagtaactaatgatgcatcattcataccaattattcttgcctttgcggagaagttaggtaaatgattaattaataacatatcttgatgataaacacatgatagaatatatcctcttaaagctttttgtaaaggtaataatttaaaagcttcaaaatcgattttaaatgattcatcgatttttgctaatttttctaaattatcgagctcatattgaattaataaattttcatgtaatgattttaactcaactgcagttttaacatctaatggatttggataaattgaaggtgtgaaaattttagattttggtaaatttaaaaattcatataaaatattactctttaattgaggaatgacaaaagtatcaacaatagcatttggatcttgagtattttcccttttaacattattatattttggatcaaatttatcagccaaaattggaggatggggaggtaatgtacgtggaggttgaattttgttatctattggaatatcgacaggggtttcaagttcagattgttttttagatttctttggttttctaggtttcttcttatcctgtgctagatttttagattgttcatctggaactggaataccacctggacctttagccatcgcttgttgttgtgcttgttgttgtaaaagtctaagctggtattctttttccttttgttgttcttgtttctgtatttgagcttgcttataaagattttgaacttccatatctgcagaattatcaatacttggatgttgaagatttccttgtgttctatcgttattcaattgaggaatcgatggtcttgattgattatttaattccattaacttagccttttgttcaggaaattgattataacttgcggttattatatttactaaatcaggagttattggttgactttgaataaattttttaaaagttgcaatctgaaatttcaaaacatgtgcttgaactggatggaagatagaagatggttggtttgaagtttgagcagatggtgagttcatttgtactggttgttcattttgtctagcaaattgtttagcttgttgttgttgctgttgattctgaggttgagcttgttgttgagtttgttgatgttgaacttgaggttgtggttgtggttgtggttgagatatctgttgttgttgctgttgatacagattttgatgttgattattttgagaattttgtaactttgcttgcagttgttgttgtaataaaatattcttttgctgaggtgttaactcagatttcatcatttgaggtgtttgattagatccattatttggactattaaagttcataaactgttgatttgagtcaattggattagaaaaagagccattttgttgggactgttgttgttgttgttgttgttgttgttgttgaggtggtccttgttgctgaagatctttattatttgatttacttttttgttgtaaatgagattgaattttttggaaatttggatcatttgataataaagtgaataatttaatatattggggcattctattagcatttgcaccatgttgaaatcttaattgttgtaaacgtttataaatttcttgaatttgagagactgataatccttgttgagtaaattgttgctgaatattattaaaatttggattatttgtcgtgtttggggtattattattgtttatatcttgaccagaaggggtattcgcttgagaagatccattaggtgaaccattctgtgattgatgttgttgctgtagcaattgttgttgttgctggtcggggatattgaattgctgagcattaaaattcatgatttaaaaaaatgtgtatgagcaatataattataattaaaactataatattaatacaaaaaatatgaataaatggataaacacggaacagtaatgaaatcaattgacggaaagataaaagtatataataataataatgggataatcactatcacttgacactgtacagtatattacctatcaatctctggaattacctaaataaaacaataataataaataataataaaagagttttacataattataatcgatgtggcgatgtttatccaaagtgtcattttttccattttttaatggacagcggggtttttctataatttatttactgtctcgcaatttctactcttttgctcggaattttagttggttattaatacacatctacaagagtggaactgttgcaccatctcctctaggatcactaccaccggcatagactaaatgatcatcgcctcgttgtgactctaatctaataatttgtcctctacccatcatttgcctgtctttacccttcataactttaactttatgacctaatttttctaatttcttaacaacttcatcatcaataccttcttcaattccaacaagtgtgaaatcattagatactggtccatctgatccattaccctttatcagtatgttcatattctggatgtccagataggcaaattctaggtgaatctaatgcctgttgtggattcattccaaaataaatcatattaagataaacttgtacatgtgcctgtggttgattatatcctcccataataccatatgatgcatataaatgttcctcattatttctttcaccctctgttcctgtggtaatcatacctggaataattgtatgatatgaacgtttacctccttcaagacaattcttacttgttggatttaaactaaaattaccacctctattttgtaaaacgaatccacgttttggtacaataataccactaccaaaaccttcatataaagaattaataaatgagcatgcattaccttcactatcagttactgtaaaatagacaggtatcagatttaaacattggatttgggattactaatttattattttcaatcactttatcattttgaaattctttacttcttaatgaaagatattcatcacttaaaactttaggaaattaaattattttgatcaataccggttttctccttatgatgatcataatcattaacatattcctcagattccttaaatgaaatttttaaacattcaattaataaatgtaaatattcagctgaattatgatttagttgactcaattgaattgtcttatcattttctaattgtttaattaatcctaatgtcattaatgcaataatacctgatccatttggtggaatttcccataatttatgatttaaaaattcataactaattggttcaacaaatgtagttttatgatttgataaatcatctaaagttaaaacatgacctctctttttcatttcttctacaattgaattagcaacttcacctttataaaagccatccttaccctaataatgcaatggttttcaatgtatttgcaaaatcaatatttttcataaattgtccctctcttggagctttagaattattatcatttggtaaaaaattcttaatatcatcactatcattatcattctcctttaataatttactttcagaattctcccataaatgtgcactaataccagaaacgacataaccattctcacataaatcaatagcaggttgtaaaatttctgcaaatgaaacattaccacttccccatttttcaacggaatcataccaacctgcaattgcaccaggtacattaactttaaaaactgaatctttcttgaatctgaaattaggtaaaactatgatcaggatgattttcctttaaatattcaatattcaaattcttagctgaacgacctgtaccattcataccataaactttcttatctgattctttataaaataatgcaaaacagtccccaccaattccagttgatgcaggttctaaaactgttaaacatgcagaaattgcaactgatgcatcaacactattaccacctttctctaaaattttaatacctgcagcatttgctaatggttgagttgatgaaaccatccccttagttgagtaaactgttgatcttcttgaattgtatgggagatccattgtggttgtctagagagtttggtatgaagaagtgtattgtatataattttcaaagatcaattatcaaagatccacagtttctgtgtgctttgttcaatctgaaaaagcttatcgtatcggtcttcggtatttttttcccgataatgcgaagtggatattttttttttcctatttgggacttccctagatacttactttatattattggactgttaatttgacattgtaatttctcttgttattgatgtgtgtctaattgctttaataagaattagaaattataatttacaaatttttaccctttgatggaacaaaaactcttttaaaaacagaagattaactccagaaattgagcaaaaaatcaaacgtcttcttttagcaaaataactatttcatcaaaaagctacacaaaaataacataccaaggtatggaagtccaaacttctaagcctctcaataaggtaaaaattaacaaaaacaagccagaggtcacgtgaacttactatgtggaatttattctacaaacagtaattgcacaggaagcataagtggccgagcggtctaaggcgacagactcaagttctgttactggtaacagtgcgcaggttcgaaccctgccttatgcatttcctagcttttgcgggcttagctcagtgggagagcgccagactgaagatctggaggccatgtgttcgatccacatagctcgcaaggaatttatttttttgtgtcttttgttttgttatttttgtacaaatagaaacatttttttaatcttgattataatgattttgaaagaattatttagtaaattattagtatagcttttatacagaaagagttatatattataatatgtttttatttattattgtattgtattttatatattattagtaaacgagagtagagtagtactgattaatgtttatagtaaatttaaatcttctaatctttgacaatgaggtaactccattgattcagcctttttaatggtttcccaatcattaaataatataccttttgcaccatcaattaaatcttttttataattcatttctcgtttacaaccaaattgtaagttgttcaatatatttattttcaacatatttatctaaacctgataattcagattcagaatcttttcgtccattaaaatcatttaaagtattttcctcaatataataaggtatattatattttggtgttaaacgttcaatttcatatttatcaaattttgtatattgataaacaggtggtttaccatgaaattgttttgaatttgatctaaaattataagaatctgatccacctgataagaaattcataaacattgaaaaaaatataattaataatggtataaattgaattaatgttgctaaccattttggaccttcctgttgttgttgttgattttgtccattacgtctatttgtacgatgttgttgatttgcacgtcttcttgcattcataccaggatttgtaaagaaaaatccattatcacccataccattcataccattaccaccaaattggaaactaaatccattattaccacctgcacccatattaaataacatattaaataaatcatcattaaatccaccacccatgccagcaccttgtgggaaaccttgaaaaccttgaaaaccttgagggaaaccttgaaaatcctgaacctgcagcaaaaccatttccaccaccactacgtgaatcaggatctgaacctgtcatatcatacattttacgttttgaatcatcacctaaaatttcaaatgcttttgcaataactttaaatgcttctgatgcttttggatgtttattcttatcaggatgtaatttaattgccagtttcctataagatttcttaatttctacatcatttgcagatttatcaacttttagtacacgataataatctgtatgtttgattgaaagtatttcttccactatttgcttttgctctgctgtataatctgtcattcccgatgctctctaataatatatgataatgataatgataatgataatgaaaagattataatattaataattatgtacaatgatatgagataatagaataagaaacactaataataattggtaattgaaaagtaataactatatatcttacttgcttatcagaatataatataaaatcacctatatataccagctattcagaataccaacggttgtccaacagaaattttgcaggtggcaaactgagaatttaactgaaatttgaaattttggtatgtgtggccttttctttgtgtgcttacgtaacttttagaatactttactaatactttactttactttacttacttatagttatagttataaactacattaaataaactatttatcatcatcaagaagccagagggccatctctttcttttcattatccttactcttcttatcattctttatttcatcaactttaccctccataacaacttgttgaacatgttccttttgctttgcacgatctctcattctttcctcaattgtatcacgaaccaataatctataaactgtaacttgtctctgttgacctaatctatgtgctctatccattgcttgtgaatcaatagttggattccaatcagaatcatagaaaataactgtatctgctgctgttaaattaatacctaaaccaccagctctagttgaaagaaggaaaataaataattctggattactttgccaatcattaactaaatctcttctatcacttaatcttgatgatccatctaatctaatatatttatattgcctatatgttaaatattcttccattaaatccatcattctagtcatttggaaataaattaaacatttatgatctcccttctttaaatcaactaacatttgatcaagtttctttaatttggcactttcaagaacaaatctttccattgatggtaatctaattgtacctccattcatataattagattcctcctctgggtacatctctgcctttggccaatctttaatagatacgtctttctcaattaattcagcttgtgtatctaaattcaatggtaataatgcttgtcttatcttttcattgaaaaatatatcctttttagtgttctcaaaattacttttagaacaaactatttcaattggtggtgctgatgcattgataaaatatccaggtctaaaacttctcatatacatttcctttaatgaatcatctttaacattcaataaagaatctggaattaaatctgttttgatatctgataatattaatgaattctttttatccttattataaatttctttgaaaattcttaaatcttcattatttttggaatttaaatatgatctattatcaattgcattattaattaaactattagcaactatcttttcaatctcatttggtgtttcattaataaattttaaaatgtttaattcactatctttatcattgtgataattattaacatcatagatattaaacattttcttaattaacctttccttatctgttaaattattactatcaagtgatgttaataataaatcattaacaatagttcttggtaaattataacttattaaatttttggtattataatttaattctaagttagtttcattgacttcccttattaaactttcagtaactgggtaattactaaatgaaaatgcagattttgtatcagctctctcaaataaatcaggatgattacaaacttttctaaattgcataacaacattcattaatgattcaacttcttcattattaccaattctcttattattttcaatcaaatcaacaacattaatttgtgatcttaacatacgatataatttcttttgtctattagttaaatcacaataaacatcaatttcaatcttttcacctaattcactttgaacattctttttaattctacgtaacataaaaggttttaaaattgcatgtagacgacgtaattgttcctcatttaatttagaattagattgtgcatgtgcttcaatatctttagagaaccattcactaaattcatcatgtgaatcaaataatgatggcataataaaatgtaataaagcccataattcttgcatattattttgaattggtgtacctgttaataataatctattacgacattgtaaatttaataaagatttccatctagttgattgtgatgatttgattgcttgtgcttcatctaaaatcatatattgccatttcattttttgaaaatattgtgcatctgcaacaactaattgatatgatgtaacaacaacatgaaatggtgaatttctattataaataatattctttctatcccaaaatttacgtaaaactttacgatctttagatgtaccccaatatggtaaaacattaaaatctggaacgaatttagtaatttcttgttgccaattatgtaatgttgatgatggtgtaacaactaagaatggaccccaaatatcatgagtctctgccagatatgctaaaactgaaatactttgaactgttttacccaaacccatttcatctgctaaaataccattaataccttgttcatataagttggctaaccaatttaaacctttacgttgatattcctttaatgtacaattaagtaatttaggttgatcaactaataaatcacctgccattgttggattttggaaattcatttcaccttcattatcttcatcatcatcatcttcattattactagctctttgaactccatcattaaattgttgtgctttatttttagcttctaaaagagcagtttgtgcatttgctgctgctcttttatgtaatgcatcatcatcttcatcatcaaaatctaaattattgaaatctttggttgctaaacttaaatcaacatcttcttcattatgagctttaccattactattatttgaagcaatacttttatcacccatatcaccttcaaattcacttgttttaatttttctaccaatgaagtgtgaatataactcagtttgattaattaagaaatttaattttcttgattgtctctttgcttctctctcctcttcttccttctttgctctttgtaaagcttcctgttctgcctttaatcttaagtttctttcctctttttcattctttttccagaaacttaacatttctctcatacatcttcttgccttagcatattgatccttttgagctttacttgtctttgattgccattttcttgattctcttgcagctaattgagcaattttctttgaattgatacttttagcttgtgcagtttgttgaaataatctgtatgcctttggattatcttttcttgataaatccttccaaattgataaataagtgttctcatattgtctctcaattgatttgatttcctttactgagaatctaagttgagcttcttttgcttgatccttcaatgtctctgcatcttcctctttaataatctcactagtatcattactaccactagcaccatttttaggagttggctttctacgttttttctttggtacagtttcatcactcatttcaattgcagcttcaattatttcatcttcatcttcatcttcttcatctaataatttcgataattgcgattcaatttccttttcaccaagcatttcatcatcacgtctaacaggttttcttcttctcttaccaggaacaaagcttgtagaatctatcggttttttatcagatttatcattttcatcactcttattattaccatttttatttttatttttaggttttggacctggcttacccgatcttggaccaggtttgaatccaggttttggaccaggtttctttcttggaggttttacaggtgttgtagttgaagaattagttgatgatgattgaggtttgagttttaatgtaatggtagttggagtagatgaatttatttgcagattcattgaaaagtacatttttcattggatcaatatcatcaactcttaaattatcaatataaggatttaaatcatttgttaatgaagtttttgaatttggatgatttttagaattaagtaaatgttctctctcagtttgagcatcaacaaggaaattaatgacatctgattttaaatgatttaataatggttcttcatcatttagaattttatgtcttttaaaaatttgttcatgaattgttggatttgaagctaatgaattctttaaattttccattaatgattgttctaaataaatcccattagttgtagccaaactctgtaattgatcattatacattttgaagaccatttataccattatttgcagcattatccaatgtaattacagtatttaatttttgtttaaacacgttaagtaattcatctgatgatgcaagttgaaatgaactaccatcagttattccaacttcaccatcactaccattctcttcctttgtcatatccaatggagtggttgcttgtgaaacagtgagaatgaacgaataaagacttcttcagcggatggcaatattaattaattaaatgcacacacaacacactgcaagttatgtttcgtcgagtatgttcaaaacttacctaattaattacaattaattacttaattacttaacgtcattctgttactacactcttctctttataccacgcagtgatgtcccagagtaatgacaatatagccaatgcagtggctttcttgaaagattcatctgttaaggatacccctatctcaaagaagatacaattcttagagagtaaaggtatgtcagatattgaaattgaaactgccctaaatcaagttaataataataataataatagtgttgtacaaccaacagttccagctattccacaaatggcaccaccaattccatattattccaatggtatgccacctccaccacctcctccaaggggattagattggaaagattatgttattatgtgtacaactactgccggtgttgtatatggagcttatcaagttgtttcaagatatgtaattccaaaattaattccaccatcacagagtaaattagatgaagataaggaagcaatggagagaggaatttcaaagagttgaaaatatattggaaaaattagagactgatcaaactgaatttattaaaagacaagatgaaaagagtaaattaattgatgatgcattaattgaagttgatgcaattgttaaggcaaccaatgagaaaaatctacgtaatgaagagacattaaaatatcttaaattggaaattgaaagtattaaaacttcattattaaagagtttagaatcacaaaaatcaacaatttcaactgaattacaggaacttgaaaagaaaactgatagtattaaggaaactataaagcagttagaaattaatggtaataggtaaaactatctagtaaatccaattcaattacaccatcttcaactccacctccaaatttattaacaaataatagatcaacatctaatacaatccgttccaacagtttcaacatattctaatcttaaaattccagatccatcatcaattccatctgctaaaagtattttaaatacggttgaagatactgattcaaactcaaatactacctgaaccagtgtcatacccattatctactaatgctaatattccagcttggcaattagcttcatcacagaaaaacaatacatcaattcctgcatggcaagttgcatcagagaataaataggtaattaattaattaattaaatagcttttctttatataaatttataacgtttttatatactttttatataattattgaaaataatgaaacaggttttcatttttagtttaaaatcaaaagagaaaatacatttgtctattattgaaatgaagaggaaataagtggtatcttgaatatgaaagaaaaaattaaatgtctaagaaagaagcagttaaaagtgtgaattgtgtctaatactatacatcaaaatgaatgactaaaaagagtgtgtgaattagttgataaaagagtgtaatggaatatgattgaatactattaactaaaataagtaccatataacccagtttcttgtaatttaaccctattaatattttcaattgaattatcattaaggttgttaatttttgatttaaatgcatcatgtaatgcttgatttgcatcttttgtacgtttccaaatagattccaaaggatcgattaatttattattattagtattgttatcattaatgttttcattatcattagtattaatttttccatcattattagaattagaattagaattaaaattagaattagaattatttgaaatttcagtttcattatcattatcattatcattaattgtattatttgtacttgtattacaatcatttataatacttttagaatccaatatatcatttaataaagaattatccttaattattaaacttgaattaattgaggtatgagaagaatttggtctttgaatactatcagttggagttgtaatactaattaaatcatttgttgtactatttgcagattcaactaatgattgaacatttaatggttgtaatgatgataatttacccattggttcaggtattgatatagaatttaaatttgaattagatgttaatatttgaggtgttgattgtgatctgttgaaaactggtaataaatttgaaggattaattaaatctgaattattaggttcagtgaatggtgtagttgaagttgaagatgggaaattagtataatatggagaataagggtatgaatgatcaagtaatgaagagactggtacttgaggttgtggatttggatgtaattgttgttgttgttgtagttgttgttgttgggtctgttgttgattatttgaaagttgttggtataggaaagattctaatatatttgagttaggtataccttgcacattttgaatattatttacactctgtatattttgtaaactgttgtatgatttaatattattgtatctacgttgatcatttgtgtaattaagaggaccattacgttttttaacactgacattattattattgatattattgatatttagatttaaactattattgacattactagcacccagagatgtcatttgaccctgagtttgttgtggcactctcaaacggagataacgatcgatctcatccaactgcagcacaaagggagtagtggaagccattgctacagcagtgtaaagtaattaaagaagtaactgaaaagaagaaaaacctgcaaaaaccgacaaaactgaaaatttcaccatttttttaactttctcttcaacccgcactaaaaaaccgttttttccaactagcgcgtctttctttatgttagatccattattattattcttagcattcctgttcttagcttagtttctattagacaaggatgaatgatggtagcaatgctttgataccggttaagtcgaaattatggtctgctaagagaactgattggaataaacagaatgcgtttgtcaaatatgcaaataaaccagttccaagtacccattttaccaccttctgcacctcccgtttatcaacaaccatcaaaagctttagtaattagagatgatgttaattcagaggataaagacagtaaggatttaatcaatgaattattaaaacctaaagaatataagaaaataactgtcttaccgagtgataggaaaattgaaggattaacagttgatttgttagatcatcaagtatcaggtataaaattcttattacatcgtgaaaaggttaaacctaccaaaagagattatttaaatgaatttaatatagttaatgatgaattaaataatgattcaaattcatttttcaataaaggtgggatattagctgatgatatgggattaggtaaaacaattcaaataatttcactcatactatcaaatcaaccaaagaaaaaatcaactttaaagacaacattaatagtatgtcccgcttcattagtcactcaatggtgttctgaattagattcaaaggcaccttctcttaaaattttatcatatcatggtccaaaacgtcctaataatgtggaaatcgttcataattatgatgttgttgtcacttcatatcaaacactgtcatctgatcatggtaaaagaaatacttctcctttgtatcataaagattatccatttagaagaattgtattagatgaagctcatactatcaagaatagagatactaaggcgtattctgcatgtactgatgtagaatcaccgagaagatggtgtttaacaggtacaccaattcaaaataaaattgatgaattatattcattattaagtttccttaaagttaataaatatgaaaattttaatttatggaatttgaaaatacaaagtcaattaaattctaaaaattcaaatgatataactaatgcattaacaattctacataaaatacttgataaatttatgattagaagaactaaatcaattttgattgaaaataatgttttgacagtgacaaaaattattcatactgaattattagattttacaccatttgaatcaaatttatataagaaacttaaaatgaaaattattaaaaatataattggtaatgatttttcaattgatgaatttaataaaggtaaattaattaataattcaaatattaatctagattatatgagtgtattcacttatttattaaggttaagacaattatgttgtcattgggaattactgtttaatcttaaagctgattcaaatcttatttatgataataatgaagatgaagattcttttacaaaggaaataactaagggaatttctaatatttcaatgaataatgataaacttaatgatgttttgattgatgatgatattaatgatatacttaattcaatgaaacaaatgtcaattggccaaaaggagttaaatagtgataccaatgtcaataatgaaataaatgataccatcatcaacaacaccttcattacatgcaattaagattcaaagaattttaaatattttgaaaaaagataataaggaaacaccacgtaagacaatcattttctctgaatttacatcaatgcttaaaatcttatcccaaatattatttaagaataatattaaatttgtacaatatgatggaacaatggataaaaaatctaaggatgaatcattaaataaaattaaaaatgatccaacagttcatgttttattattatcacttaaatgtggtgcatatggattaaatattacatcatgttcaagagttatattatatgaaccattttggaatcctgcaattggatcacaggcaattgatagatgttatagaattggtcaattaaataatgttgacgtttatgaatttttcattaattatacaattgaaattagaattaaagaattacaagataaaaagaaagaattaatgaaagcagttattgataaagatgcaaaatctgcaattggtttactgggtaatggattaagtaaagttgaattatttaaattacttgatataaatattgagtaaattaattaatacacataaaacttaattagttgaagttgctaaagttgttttacctgcaagacaatcccttttagcaacaccatttaattcatgacatgaagtaacggtactataaatagtttcagaaggaactgtaatatatttagttgtaactaaaccttcttcttctaaaaattgttcacaaactgaaacactttgagcaacaatattaattgcagttgtaacataagttttatcaccatttaataaagttgttggacttaaaccttcaaaatgttttgtaactgtaacaatttggaaacaatcatgaggtaaatcatctgcttttgttaatgaaagtgttgataatgttaataataataagtttgttaattgcattgttgttggtcgttgttaaagtaaaaagatcattaaagaacattaagaacttaccaagtgtctaaccttcctttttatagatcaattatataacaatgatacgataattaacatggttgattaaatattagatgaaacaagtaattgatacatgtatcaagatctatgcatgcattgattaaacttttaacatgataagtttgataaatgatagcaaatagaagtgatatttcccaattaggacatatcaatggatattctcttaaaataatactataattttgagcacacataaattaattcatattaaaaaaatgtattataaaatatattatagaagtaaatcataaagatagtaattagaaaaggtttcattaagaaaattaagcattaaaaaaagtgaaaagttaaataaaatattgaattaataatttaataccaatatttaaaatcaggattaagatcaccactaataatttttgatctttcatccttttcattccatttttgtttataactatccttttccttaatatgatttaaatatctaacataaccaaaataaacaactaataaagcaaatgctaaacaagcaaatccaatacaagtaccaaaaccagttttatatcttggagcatctttattcgggaaaaggaaagcagaaataataccaccaatattaccaaatccaataacgaaagctgtaccaactgattttctagtatgacctgaaaaatttaatgacatccaacaaattaaaattggcatacaagaatataatcccattgcacttaagaaacaacctgcatatcttgcatttgcattattacaaccaaaaaccattgataaacctgcaattgaacaactacttgcaattaatgcaaatggtaatctaaatttaaaataatctgatgaagttgctaaaattaatgataaacccattgttgctaaccaaggatagattgaatgtctttgagcttccattgctgtataacctaattgttgaataacacttggtgcaaagaatgcataagcatatgaaggtataactaatgaaaaataacataatgcacaaatatataacattggttctttgaaaactgttaaaacatctttccaagtttgtttaacttcaaaacctgaattaccttgataaaattctaatttcttcttgaggaaaattctttcttcagcatttaaaaatcttgcttcttcagggaaatctgcaacaaggaaataaagtggaattgctaaacccatagtaaaagcaccttcaataatataaatccattgccatgaagataaaccatgtttaccatctaaatcatgaattctataagctaaagcacctgcacaaccacctgcaagacaagtacaattaaagaaaaatgcaattcttcttaaagattctcttggagtataataattagccataatatagaaaattgcagggaatgaaccagcttcgaaaaatacctaagaataatctagtaacaactaaacctgcaaaattttttgaataagcaactaataaagtaaccataccgaaaaggaaaatcattgaacttaaccacatatgaggtttaataactttaattaaataatttgataatgacttcaaaaatgatataaggtacaaagaaaactgttaaagcagttgcatattgattaccatgtaaatcaagttgtttttcaataccataaacttttgcatttgaaatattaactctatcaaggaaagcaaggaaataaagtaaacaaaatggaggaataacccaaagatcaattttccacataagtttcttttgattaattgaagatgaatttgctaattcttcaatttttaaatttttttcatcatctgaaagttttaaatctatttgatcattatttgtagttgaattgaaatgtatagaatttgttgtattattttcaatatctttagcatttgagctaaagctagcagactctgaacctttttcggacatttactatttgataaatgaaagtgataaaaaatattgaacaaatagaagaaatcactgaaatatattgactactgccactctatttatattcaaacggtaaacctgaaataatctttgataatctctttggaatgactcttaaaccggagaatggaaagtgaaaaatttttaaaattatgactgttctccgatatttccttaaaagggtaattccggcgcgcttaaacaatagatagtattaaagtcaatttggtagaaaaggccctgcttatttcaccacaacggatagatggatataattaattatcaagtactcctctcttcatctatccaatcatctactattagtgtttgtctatcgtattaaaattacgtaatattataaacttaagtatacaccatacatatgcacatttaataaacttctagaacgtatttaccatcttccttcatttcttcaactgcctttgcagcatcaattttaacacctctatccttggcatcactctctaaaacatcttgtaaacatgcactaatatcaggaactggccatgttggaccacataaatagaaataaccatcttttttaacaattaattcctttaattcttctaaattttctctaattttatcttgaatataaattttattaatttgatctctactaaagctgcacctaaatgagttaaaattttggcatccatataattttcccaatattcaccatataaatattcttgtcttttatgtcttgaacccaaatagaggtaaatttcaccaatttcattaccttgttgtaattgatattgtctttcttcaataaatgccttaaaaggtgctaaaccggtacctaaacctgccataataattggttgtttagttaatggaggtaatttcataattgatggtttaacactaacaactaattcatcaccaatttttaaatctgataaatatttagaacattgaccaaatcttttacgacctttattatcaatccaatcaacaacaacaattaataaatgaacttcatttggatgtaatttttgtgatgatgcaatagaatattctcttctctttaatggattaataattgaaactaattcttgtgcatttggtctaactgatgggaaaatttcaaaaatatctgcaaatgtataaaattcaacttcttgatattttttaaaaatttctccacctgatggtgaaataattttctctaataatttcttctcttcttcattagttgcaaattcaattaatgattcataaaatttcttacctggtttaccaaataaatctaaattatcaattaatgattgtcttaaagttctaatttcaaaaatttgattattatccctagagacaacttcaattaattcatcacctgtaattccattaccatacattttaataaattcatcaactaattcaacattatttctaccatgaatacctaatgcttcaccaatattatattttaaaccggttgtaccaatatcaaattcaatatggaaaatattacgattataatcatctggtgttaatctcttattttctttaactttaacaataaaattttcacatggttgatcaggtcttaatgatttttctgtaccataagcttctttgaaaattaatttctttgctaattcttcatttgcttcaactttaatagtttcattatcaataaataattctcttggatttggtttaaatgatgttggtctagtgacggtaaatggttcttcatcttcttcaatttctaattttgcccaatcttccttaaaattaataattttaaatccattagatttaatattttcaacttgatctgcaataactgatgctaataattcagcttctgaaccgaaaaattgtaaaattttagtaacaactgaatgtttatcccaatttggataattcaatgaccaaattgctgattgaattgcaattgatttagttctaccattagtttcattaacttcattaattgaatttaaatctaaaaatttaagattaatttttttatcggataaaatttttttaactttatttgaaattttcttgtcaataattttatcttcatcaaaagttgattcttcattaataattaataattcaccattattatttaaaatttcaataaggttaattgaatttaaaatattaatatcttcaattaagataaaatcaaatttttcaattatatcaatacctttaccaattgttaaattaacttcaaataaacctgcattaattgaattatcataaattgattcaaatttaatattttcatcttgaattaatgaaaatgcatgagttaatttagatggtaattcaataaatttagaattatcattaaataaaaatttatattttttaacagaattagtaacatttgcagtatatttagtaataaaatcatttaatgattgttcaataatattaattgagaataatccattgaaaaataatgatgccttgatatctaatttaagtaatgaattatcaataacattaatttgtttaatattagaattaattaatgaattaaataatgatgaatcaaatggtacaggtgatttaacaataataaatgcttcatctgatttattttcattaataattgaattaattttttcattatttggataaagaatattaacaattgaagcattagcattaccgaaaaattggaaatttttaaaatcagtacctaagattgaattaactttttctaaagtgaaagaaataatatttaatggattaatatttaaaattgatgattttaaatcatttaataaattaatttgaaatttattaatttcatttgaatttaataaattattaattgattttgtaatattagtttcaaaaccattaaataaatgaatattgttaatatttaatttagataaaacgattgaaatgattgaaaaaatttgatattcaaaatcatttgatgaaataagtaatggtaattttaaatttttactaatttcaataacatcattaaaatttgaaatataactgttagaattaaaatcgtaggaaattgatgataattgaattgataatggtaatttttcaaattgattatttggttgattaattaaatttaatgaaaaattaattaatgaatcagtatttgttaataaagtgatgttttcattagttgaatttttcaaataacctaataataaattaccaaaatctggtaaattttcaaaattttcaacatttggtaaaacatcattaaaatttttctttccattagaattccataaattaattaaattggtgttttcatcattaatgaaaattttatttgataatgaataaattgttgataaaattaaattataatttgatgataaattatttgatttaatttcagttggatcaattggtaaaccaaatggtaatgtctcagttgctgtaaacattgctgatattaaagaagaatagttaaagaatagattaatgtacattacaaaatatggaaatcctatttgataagtataggtataacataaccaacggtgaacgaaatcaatctccgaaactgtggcgagtgaaaaatttcaaaaattagagagaagactgtgcgcaatatcacgtgaacgcgtcttcattgatgccttttcttataacacttagataaccactagatgatgatttaagacatctaaaacctttccaagaggatctaagtaatgattgatgattagatggggttggatctgattcatatgaacctcttgtaaaataaatatcatctttgatattatctaataatgtattggcattgattgaggatgatgatttaggtattgatttgaggaataatggtggttttaatattacgtttcagggaatttatgtgtaggtttggttattcttgttgattttgggaatgtattattaaaagattttaatttcatctttgtaaatgattgttcatttattgaaagtaatgataataattctggagtaatatatttgagtaattgtgatataagggaattaattttatttaatacttcactgttggagattaattttatatcaggtttcctaaatttattatattctgtagagacaattagttgataatttattaaatttttctaattttaaattaaataaccaattaagtaagataattaattgaattttcaatgattgatttaagaaattatttgataattgttgtttaaattgttcttcattaagtatccaacgaaattgtttattataattattaaggggagttattgataaattatcatttttaatatttttaataattgattcaatatatgataataatttcatatcaatatcagtatttttagtaaattgattcataagggaaatataattaataaatatattaccattattattattattattgtaaatacttaattttttagaaatgtaataattttccatattaatattattcattatatgccaatctaatgaaattgataatttatcattaattaataatgattcaattataaaatttcttaaatttataaaaggtttataattatcaattaattttggaattctaattaataataatttacctaatgttaataattttgaacctggtttaattttcccctgtaatgaataattatttgataatttaactaatcttttatcttctaatgaattatcaaataatgaaggtactaaatgatcaataagaaatgatagtggataagtaaatgataataattgaaccaatgtattaattggtaatgagccatcattaattgataattcaatagaatcatctataagttttaatgcattatttaaattttcctccaaagtggaagtattaaaattcttacccaattcaagtatacgattatctaatacgacgacattgttgactatacagaaaaagaaaaagctataaactaaaccaaaggataataagacaaactaccaaaactgatgaaattatgaaagcagattttctttgacgagcgttaattttatttaagaggttgtttatcattgggattgatgatattgaattggacaagttggttgatatattagataataaggaatcttgtctaagcatttcatcccttgtatgtattacttgattaataagagaatcaactattgaatgttgattattaacacgtaattgttcatcaagtaaataattatcataagttgtatctgtagttgtttcttctgtagttaatgttatttaataagttttttctttgatgatcattatttaatctttggaaatcttgtctattacgttttaattcatctttaaatctttgtaattgattaaatttaattgtatctgatgaatcaattattcttgataaatcattaattaatgatgaaaggttagataattgagattcaattttagattgaatttctaattgagattgtaatgatgattcatttgatgaataaattgctaataaattggataatttattagaatttgtaattattttagattttaattgagggaatgacattaagtgaaattaggcaaatattaatccaatcagttaattcagggttaagggtattaaattgacaagggtgaatgaaaaatgtattgaattcaaatgatatattatcgaatgttatgaatatctaacttctctttaagtaattgaatatttaaatttaaatttgaattaaagtgaggtttaaaaaataatgttttacaattaaatgaaggatgtgttttgatggtgaatataatgtaataattggtgtcaatgatgtgagtaaattgtaatgaatctttggatattatataattagtgaaatgatagttattatataaataattatatatttgaaacatgattataagtaagaaggaataataaaaagaagaataaatagatatatatatgagcgtatagtacttcgtaacaaagtacttacgtactttgtatactacgtactatacttaatcaaaagccattgattttttaatttctgcaattgcaccacctggatttaaaccttttggacaagtttttgaacaattcataattgtatgacatctataaagagacattgaattttgtaacatttcttttcttaaattagttgcagtatctcttgaatcaatcatccatctataagcttgcattaaaacagcaggacctaaatattcttgttgattccaccaatatgaagggacaagaagttgaacaacaagcacaaaggatacattcataaagaccatctaattttgctctatcttcaacagattgaatattttctctttcaggtaatttgctttcatcaatttgtaaatatggtttaattgatttatattgtttataaaaatgagttaaatctggtactaaatctctaactatatacatatgaggtaatggataaatttttaaatcttttttggaatcagtatcaattttacatagacaagctaaagtatttctaccaccaatattcattgcacatgaaccacagataccttctctacaagatcttcttaaagttaaagttggatcttgttcatttttaattttcaataagagcatctaaaaccattggaccagtttcatttaaatctaagttgataagatttcattgttggtttaatttcaggagtatcaggattccatctataaattttaaaagttttaatatttggtaatttagcagcttgagttgctaatgatcttgtaaatgttaataatttcattgtatataggggatgtcttaaagaagagaagatagaaagatatgtaaaagagaataatagaatataaataaataccagtataataataaattaataaaagatgtaatactattggataataaccctaagttctcactcttagtaataaatgaaaaacccgtaaacggaaccgtgtggggggggaagagtattagtatattcggaattatgttatattatttcctatatattattacgtaatcaatattatgtaatcagtcacgtgactttgtgtaatcagtgcttacctaatactcacgtgaccattacgtaatactttaatagctccattaccatccccactttttattaacctttcagctattatcctgattatgtaatctgtattaacactattactctttaacttgttaatatcccttataatactatctatttcaatacattcactctttaatatcttatttattatcattttatcacttattatattattattatcagtcttaatttcaattccaatttcaatatctcttttattaattatctttttaatatctcttataatattatcttcaatacctttaacaacatattctttatcatatttcttactctcttcttctataattaatacttcattatccaccctttccatactatcatcccctttatctctcttataactaacccatttactaaacacttcactttcaccaatttcattcctcaaactttttttattaaatttttgtattttttcattagttataccaattttaggtattttattattaaattctttaattatatcccctttaatacctttattccttattattttcttattacatctaattaatactctaatatttttattaatttcattatatcttaaattaggtaatttattcattatcccattgaaaaagaatgaaataacactcccttaattctcaacgtttatgaaatttttatttttattttcaagaaatgtacacactatatatactaaacatcccttcttttaacaaataatgataatactatttcgaatacgtagatggttatttaaatatatttatcatctaattatcatattatcattacctttaatatccctattttcctataatcatctattaaataatcattatcatccaaaattaattaattatacaactttaaataatttatacattaataataatacattattcgataatttatttcattcaaataaaattacttcaaaattcccaattagtgaaagatctttctcctctttaaatgatgatgtattccaatatggttgtagagatccactaattgaaagttctaaaaataaaagattaaatgctgcttttgtcgttttagctagaaatactgaaattgatggtgttatattaagtatgcgttctttagaacgtagatttaatcaatggtttaattacccctggatattcttaaatgatgaaccttttaatgatgaatttaaatctagagttgaagaagtttcaagtggtgaaattaatttcggtttaattaattcattaaattggcaattcccaaataatttagaaaattcaccatttttcaatgaagttgttgaaaatcaaggtgatagaggtataatgtatggtaatatgaaaagttatcataatatgtgtagattttattcaggtttcttctttgaacatcctctaataaaagatttagaattttattggagagttgaacctgatgtggaattttattgtgatttaacttatgatccatttttggaaatgaaaaaaaataataaaaaatatggttttacaattacaattaaagaattaattaatactgtccccaatttatttaaattaacaaataaatttataattgaaaataatattaaattacctgatacttggtcattattttcaaataatatgaaatttttcaaaggtgaaaatgaaattaattataaagatgttaaaaatttagatgattttttcaggaatttaattaaaaatactaaatataattatgcaaaaaatgtgataaataataataatagtgacaataacaatccaatatcttcaaaattattatcaaaattaaataaattaataattaatcattcaaattcattaccaaaatcaattaatgaaaaatttaatgatgaatcttataatctttgtcatttttggtcaaattttgaaattgcatcaaatgaattatttacttcacctcaatataaagcttattataaatttttagaagattctaacggatttttcactgaacgttggggtgatgcaccaattcattccctagctgctggtatgttcctcaacctttcggaaattcattattttagagatataggttataaacattcaactataggtcattgtccttataattcaccaaatcaattaccttatattccaagtgataaatttaaacatcaagttttaccacaagatgaaatttatatgtcagaaattgatccaccagttaagaatcctttaattaattctaatttaggtgcttcaggttgtagatgtagatgtccttcagatcatagagaagttgaaaattcaggtggttcttgttcttcactttggttaaaattaaatgataataatttccccaattcaaatagtttaactaatcatcaacttaatttagatttaattgaaaattgggcattaaattctcttatggattggattaataataatggaaatattgatgattgggaaatttcacaatctgaaagagatttattatctaaaaatgttatataatctatgtaaataaatactaatactaatttttcttctccttttcaacttcaacacctaataaaactaatccactaccaatttcaacaattacaataaataatgcaccgaaaattgctaaacaataattacttatactaactccaatatctaaccatgatccttcacatttaaccatatagaaaaaccataatgaaagtaaatcacataatgaaataattaaactacttatactatattttttaaatccagattttaaattaactaatcctaaacctgtacttaataatgcatatggtataattaatttaagcattaataatgctcccattgggaatggatcaaaaattggtaataatctataaactgaatctaatgaaaatgttgaaattgatgaaatattacctgtaccgaaaaatgcaatttgaatattgaaaaatcctaaaagtgcaattcttaataattttaaattactaccccttatagaattattaattgattcaatttcaatccaattgaaaatcataattgaatataatatatagaaaaatccttcaaatgatatacttaaaattataaatgttggactcattgtagagaatataattaaaaatctaatttgataatctttattaacattaattgaatgcccaataattggaattaaaaatgatattgttaatataatccatccaataatttgtgaatcaattggtaatccttctcttttagttaatgaaacaactgatttagttgttgaataaatagaaattaatatgaaaagtatttgtaattgaataagttttttagttaaattattcattttctcctttaataatgaatatccaataataccaataattgtcattaaaatacctgaacaaataatcatattaattgattcaactttaactggattttgaattgggaaaatacttaataataaacatgtaataaaccaactaattgataaagcactatttttcttatttgcaaaaaccttattcttaaaaactaatattggatataaaattgataaaataatataaatataactaaaattttcacgattttcaaatccaattgcaattgataagaaaaataatattgtacaaacgattaataataatctaataaataaacttaatccttgacaaaaaatattaatacctaattgaatatcattttgatatttgaaaatttcataccaaaagaaaattgggaaaattagataaaattgataattaattggtaaattttggaaataaaataaatatgaaattgatgaacctaatgaaataaagaataatttagtgaaaattgatgtaccattatttgataatttatcatttggaattataaataattgtaaaaaaattgtaaatgaataaataatccaaccaataaatcctaatgtaacaacagttctaatcattaaccaattatatttttgtaaataatccatacctttaataatttgtccattaaaagtttcaattaatttaattgtctctttttcaacttccattaattcattaccttgtaaattttccattgatttaattaatgatttaatttcatttttataattttcaattgattttttttcaaaatgtgggaaatttttaaaattaatttgatttgatttaacttcatttaatttaacaatatattgttctaataaacttaatgaattataatataaaccattaattttattaatttcagaatcatcaatgaaagataatggtaattcaccaacattattcattggataattaagaccaattaaataactcattaatggtgcaatatctgcttgctttatatcatttctttgaatattatctaaatcccaatttgacatttcacttttctcaaattcatcattaccaatcaaaaattgattttcatttggattaatatattttggtttattacaacctttaccccaacaaataaatggagttctagtattatttggatgaccatcaccatgagaaccaaaatcactcataccagtgatctgcagtgaaaatgaaaacactttcttcatcattgaaaaattcattaactttaccaacctaatttagaaatttcattatcagtatatttaatattatcataatattcagatgaataaggtctataactatgacctgcagtatcagtacctaataaatgtaaaaagaaaatattaccatcttgtctaatttgatcatttaaattttcatcccttgttgaattatcaaataattgataaacatgattgaaaacatatttatctaattcaattgaacttgttgtaaaatcttcaaattcatgaccatacatccaaatatcaactttaccatcaattgcaccttgttcaaacattggtaaaatatctggagaaccaaatgaataagtatgagatgattgattgaaaactgaatcaaaatcaacgggattttccttccaaccttttgtaactgcactaacatcttcataaaaacctgcaatcattgcaacatgaccaggacgtgattcagttggcattctagtatgtgataaaccataagtaccattatttaaaataattgatctaagaaatggagctaaatattcaaattcaccagattgaggattttcaattaatccaagtgttttatcagctctttgaccatcaccgacaattaaaaataatctctttgcaggtggattattaataattgataaatgttgatccattccatgaactaatggagaaacgaaataaatatcgaaaattgaccataaataaaccaaatggaagataacaccaattgccaataataaattcctctttgaatgtactgaccccatcattcaacgtctacaacctcaactaaaagaaggtaataccaaaccataaagaaaaaggaaaacaacttgccattgacagaaaaacgacacgtcagaaaggggaaacgtgattttctataaatgatgcgctttcccctctattgatgacaatttgatgacaattaattgattgataccttctttcttcttttgaaggacaatacaaacttatatacaatggtttctgaaacatttacacaaaaggctgaagcaatctctaatttaccaactagaccatcagatgaagaattattaaatttatatggtttatataaacaagcaacagttggtgataatgaaactacaaaacctggtatgtttgattttaaaggtaaatataaatgggaatcatgggataaattaaagggtatttcacaagaagaagcagaatctaaatatattgcattagttgatgaattattagctaaatattctaattaatataagttatataagttatataagttatttagtcttttctttaatattaatattattaataatatttaattgattattaattctcattgagaaatcaatcatcatataaaatggtaataacattgttggtgtatataaacttaataaattaattaattccttattattaagtccatgatcattactttccataataacataaataaaacaaactaatgttgtaaaacctgcattaaaaccataaattgttaaataaatccaacttttaaatttaaatgatttattattagttaaataatgataaactgcataaaagaaaattggtacttgaaaaattaattcaaataatacaaatatttgaatccataatggagtttcaattgctaaaaaatctttattttgttcaatatgaaattcagagagagttttctgaatattaatttgatatttagttggaataacaaatgttgcatccattaataatgtgattggtatatgaattaagaaataaatgaaatagactgtatccatggttatcaattgataatatattatactattctatatcgataagtaaatatccatctgtagaagtaatttaaaccttccctattcaataaagtgtgaaagtttaattattataagaaatcttctattaaaaaattaaatattcataaaaaataaatgccacttgccagaattgaactagcgacctctgcattacaagtgcaacgctctaccactaagctaaagaggcaattatatcttattttattcatggtctcttgcatcgtgcgcggctcacgtgacggttttttcattttattaatatcttaacaactactgggtatttcatactaatttttggatggtaacaacaattttacttttctctacatagtgaatatatttatatgtccaattgctataaaataatattaaagtgaaaatataagtggtagcacaattatgggattaaaaaaattaaaaattaattataacccatgaaaaaagtaacaaagacattttaaacggttggcattatttagagctttattaagtgttcctgagaattgtcattaagaattcgtataatgtgtaaacgttataaatatgaaaaagatttcaacgaataattaaatagtacaattttcttcacatcgtgaatcaacatcagtaaacgtggaactgaacatgtttccaagtttcccaccaaaagatgcggttgttatatatgttgacgactataagtaattttctctttgcttacttctctaccgtttattattatttgccattaattattcagaattattagacatttttgaagataagcatctgagtagataacaatataataaaattcaaacattggtaatattgttggtcaaacacaattttttttatccagcattcattatccatgttttttactattggagaacaagcatttgttaatccaatttattatatttccactttaggtttaagtgttccagttgggtttattacttatggtttagattttacaacagtttggagaccttggaaatggtactggttaattattggtgttttatcaggtcttggagcaattgcagcattttttgtctttccagataatccaactacagtaaaaggttttacattagaagaaaaagtttatattattcaaaaagttaaaaatgcttcaaagtatgctatttaacaaaaaacttttaagaaacatcattttatggaagctttaaaagacccaatttcttgggctttctttttattcagtttactcaatatgttaggaaattctgcacaaagtcaagtttcaattatttatcaggaattaggaatttctagagttatgactattttacttattgttattaatacaggatattttgttttcgttgcgatttcaacatcaattttcttacattttagacgataaaatgcagtttgagttattattgtttgagcatctattgtaattgctggcggtattattgcattaaccatttcatataaaaacaaaccaggtattattgatggtatttatgactggtacgaaaggtactatgtatattcttggatttgattataatgctacaaccgctcaaggttataccaaaagattaacgaagacattgatgtggataattggttattcaattggtaatattcttgcaccacaaatgtggaaacaaaaatatgcacctagagattataatactgttgatgaaaatggtaatacagtcagagagaaagttgatatttcgatgcttgacttgactgatttagaaaataaaagatttctttatccattgtaatttatttatactgtatataatatgataacttgaaccattcactaataaaccacattaaagcaaattagtagtggctgttcacatagaaaacgaaaaactgctttgcggatttagaacggatttagagcggatttttcactggtggattatggcatgtccgaaatttcaaaagtgcccgaattacttaaatagagggcaaataacccaatgggttaaaaggacatgctttacttatttagttcttttgatcttctgtaattatataaacaaactcattttaaacaatggaagaagatttctcagataaattatacacacgtcttggtaactccggtcttagaatctcaagaattgttgtgggatgtatgtccataggtaacaaacaatggggtgattgggttcttgcagaaaagaaagaagtttttgaagttttgaaaaaagcttacgatgttggtattcgtacctacgataccgcagatgtttattccaacggtgattctgaaaggttacttggtgaattcttaaaagaatacaatattcctagagaaaacgttgttattttaagtaaagttttctttccatatgatgacaacaatcctgaattttcatttattaaattgatgatgaacaaggtcaatttacaaaaatttcacaacagaattggtttatctagaaagcatattcttgacgcagctgaagcatctgttaaaagattaggtacttatatggatgttttccaaattcatagatttgatccaaatactgaaattgaagaaactatggaagctttacacaatgttgttagatcaggtaaggccagatatattggtgcttcctctatgagagcttatcaatttgtcaatatgcaagcagttgctgaaaagaatggttggactaaatttatttcaatgcaagattatttcaatttagtttatagagaagaagaaagagaaatgattccttattgtaaacaatacggtgttggtcttattccatattctccaaatgaaagaggtttattaacacgttcattaaatagtgaaggtactttaagaactaaatctaaaccagaaaatctttccaaggcagatattgaaattgtcaatagagttgaagaaattgctaaaaaacatggtgttgcaatggcaactgtttcattagcttgggttttacacaagggtgctaatccaattgtaggattttctaaacctgaaagaattgatgatgcgttagctgcagttgatctggaattaacggaagaagaacttgcatatttggaagagccatatcaaccaaaacctgtttcttttatgttggaacaaaagaaaattgaatttaattagccgtagtttctaatatatttcttatataacacttatataattacaattacataatcatgaataaaatttataacactggatgcatatatctatagaatagtaacactgtgtgcatatagtgtatatcttagataagaaaaggtaatattaatttaaaaataaagataaagatacaacacgtccctcatgaaaataagtaaattaaattaaattaaattaaagaaccgttaataggggaactattaaaaacgttatcaaagactctgaaatatgatatcataatgatatcaataacatcacttatttactatcaattataaccatcaccggggaaacaataattattaatgcattttgttgggggtgaggaaccggaggaaccggggtagaaaattatggggaaatcggggaattacggacaatcaacttagtgacttgacccaccgtgtacatcataccacctattaccgaaattaaacgagatctctaattgtttaaagatcttaacgaattactatttccgcatatttctatttaataaagaaaatttaaaagattcctatatgcataattcattgcataatcatgtaaacaaaaattactaattatgcaagagactttaatgcataagaattcttggttaactcatcagctgcaatggaatgatgtattaaatgtaactaaccgtcatgttattaagttaatattttcataatcctaattttcaacatttagtgaaatattaatatttattttttgattgaattatttagtaaagtatttttacaaattgataatgaaaagttatatataagcacctttaagtgttatataattgtaattataattaactttcttctctctattcattgaattaattcaataaaggcttctctcttctaataaccctactacattattacaattattacatatcatatatttctatactatatcctcatagatatagataaaatataaaatatatataaaatacaacagctatgacaccatatataggtaattcacctattagtaggtttcaatatgataatcaattaacaaattttattcaaagggataatagtccaactaatagtttaaatagtactttaactaataatatttcaaataataattattcatcaccatatatacccaattataatagatcagatgattatttgatatatcaacaacaatataatagcccacattcacatcaacaacaacaagattttcaatttcatcaatttcaacaacaacagttacaacaacaacaacagcaacagttacaatatcaatatcaacaacaacaacaacaacaacaacaacaacaacaacaacatcaacatcaacaacaacaacaataccagtatcaatatcaacaacaacagtatcaaatgcaattacaataccaacaacagcaacaacaagcacaagcacaagcacttgcaaatgtgcaggcacaatcgcaagggcagcaagtacaacctattcaatcaatacaacaaccaccttatcaatataatttacaatattattcaccacatcaatttatatccaatgatgtcaatattaataataattataatatgaatattttaaataattcaaataatttacaaataaagaggaaatataaattatggtcagaagaggaagatttattattatatgatttaaagaaaattcaattattaagttggaaagatattgcattaagatttaatgatagaacattacatgcatgtcaatttagatggaggaaaattagtcctttttttataaatgaaaataatacaattaggattaatattaatagagataatgaaagtaatgatagtaatgatagtaatgatagtaatgaagatagtgaagatagtgaagatagtaaagatatcaaagatgatattaaagatgatacaaacgttaaagaaactccatatcttccaccacgtacgaataatatcagagatatacttaactgataattatgtaaattacttctattctatattctatattctattctattctatactctatatatcaataactcataccttacccaactactttactccacacatattaatgtaatgtaatatttaataaggatacttatatcatatatcagtaatgtcaacttattaaaactggctataacctcgtaaaatgacaattttcatcaggtgtcattcttaaacccgaaagggctcagctttccataaacgtttcttatcattttaataattcgtatcgttttaataacatttccatatttccgtttatgataaatgaataatatcaatgtagtattttgattaattaaaattaattataataatgctacataactagttaatagtactagaattattataatattaatatctaacatatctgttgtattatatcaagagtataccgatatcaataatgtttttaaaaagtgtcaaatttagagaaattcgttaattgtttacgaatatttcagttgaaattttcttagttgttcttctcattattataattaatgttatggtactattgattaaaatattttaaccttatattttccactaataaattctttcaattgtcgaggagttgtccattcgaatcctgtgatagtacagtaactcataatccggaattgaccgattgtttactaactctccattttcggataatcttcggataatgtatgaatttaaggtatataattgataatcaattatcgttattaaaaaactatataactgtgaaatatagcataaaagaattaaacgaattctagtcttccctatagaaagacattatttttattatcaaccggtaataatgatattaaacgatggccatttattttcttctttaatattttaattattatcaatttatgattacataattatagtagcattacagacgcgactattaatttaaaaaaatgtcgactggtcaattatacgtgtattacgtaatttttttttttggtatattacaattaccaattattaacatgattcagattaaaagtaggataatatgtttagaataaataataatataaaaaaaaagtataataatatagtatataaaattttagattagagacaattacaattattttttattttcatcaattttttcatctaatacaggttcaggtaatttaaattcatttggagttgaatcaattccttcaccaatttgatcataaactgatgaaccaactgaaaaatttctccaagcttgagttaattctaatggttcataaacaattcttctcttttctgaatcatatctaacttctgtataaccagttgttgggaaatcttttcttaatggataaccttcaaatccataatctgttaaaattcttcttaaatctggatgaccttcaaaaaatataccaaacatatcataagtttctctttcaaaccaattattacctggatataatggaactaatgatggaattggtctaacttcacttgtataagttttaactctaattcttgaattaaatctaacacttaataaatcataaacaatatcaaatctattagttctatttggataatctgctgctgtaacatccatacatgctttaaattgtgatgatgtatgatcttttaaaaatgttgttaatggaattaaacctgatggtgatgtataaattattaattcatctttccaaactgaaaattgttgaacaaattttggtaaacatcccataatataagtaccaaatttatgtaattcctcagtttgaactttatatttttcctttggattatataatggtacatttaattctttaaaatcaggtcttggtaaatctcttggatttggtaaatctttaaaactaccttcaattttattatttgatgtaattgtacttgtaatattcaaacgtggtgaaatattagtaaatgttctaatacctttgattaatttactattggttcctctacctaacatctttaattccctttgtactacctaagaattcaataactactcaacaacgaataagattgaggggaattgaaattaaaacattaagaaattcaattcaacgaatttcgcaaattttgaattttaaaaaattattttatcatggattacgtaaagtattacattaattataaactctcccaagattgaataactgaaactgcattcatacgtacatctcttgatttatcactaagcattgaattaccaatgttaataacaattctcttataatggaattatcaatgggatttcaaaaattgtcattaattttaaacattttaatgaattaatcttaatttctttattattataattttcaataattttaatacaattattaataattgtttcaatatatggtttaatgagtaatttacttaaatctgattgttcattaagaatattattaataattattgtaattgaattgataatatttgaatctttattagttgtaattgtattaattaatcctggtaataaatcttttaaatgagatttatataattcttcaggtaaataagttaaaattaatggtaaaataatttcattataatctttcctttgtaaacaaatttctaaaactttttgtttccaaatatttctaattattaaactacttatagttaatttattattatttctaatcattaatgttgatttttgttttctataaatacttattaaactttcatttatatctttttcattattttcatcatcattaatcaatgtaaatataattgaaattgttttcaaaacttgtttaaatgttaattgatttaatatttcaaataataattcaattgatttactatcaccttttaaaattaatcctaataaactccaaattttaatttcattattaatttcacctctgaaaacttcacaataatcattccaattaaaatatttattaataattactgtaataccaattaataattgtaattttgttaatccattactttcattattaattaattcacttaatttaattgtaatttccttaaaatttggaattttaatatcattatctaatccttgaattgttaataataataatggtaaatgattgatgtcaggtatagtaatatttaaatcattattttcaataggaatttcatcaattgataataatttatgaaattgattgattaattgaataattaatctctctgcattttcattactcatactaattgtaaaacgacgtaaaattttaccaatataatgaattaataaattatcatcattattagtatttaagaatgttaataaaatcggaataaatttatttgaaattgaatctgtattataagtaattggtaatttattaaataatgaaactaatgaatttaataaaagttcaattggaatattatttgttggtgaattaagtaaattaattaatcttaaagaagatttttcaattaatgaatttgttgatgagaataaaataatataatcaattaaaatacattgttgttttaaatttatttcattttttaaaatatttgaaagtaaattattaattatattaattgtatcattttcaaaatttgattttttagaaattttaacaattgcattaattaattcagtttctaataatttattaaaatcaattaaattatttaatgcattatttaataaattttcacctaatttattaataagtaaatctgtttcttcattgaaaagtggaatttcattattattattattatcattatcattattattaagaatcaattcaataattaattgaattgctaatatttgtaatgaaatttctaaatttgatgaagatagtgaaatttgtaaaattgtgaaaatttcatctttaaatggtattaaatgattattaaatgatttaaaatatgataatgcaattaatagggaacgtttattctttgtttcattatattcattagagaataaagaattaagagattttgataaaattgcttgagaatcttgttcattattagaatccgatattaatgataatataagataagattgtaaaaattttgaattattatttgagaaagttaaatttttagataaatcatcataaattaataatttatcattataagataaattttttgataatgaattaattgtaattaaagaatgataaaataaattatctgattcatttgaagaattttcataatatgataaaatattatcaattgaaattaaattaattaattcttgatttaagatattatatttaattgtattccaaattaaaaggaaatgattatgaattatatcaattgaataatttttagatactattgataaagtatttaagatatcaattttaacattaattgaagaagaagaattaaatttttcaattaaattagggaataaatcatttgcatataaattattagaagataatgaattattaagtgaatctttaagtgaagaaattttcacattttgtaaatcatttgaagatttaaatgaaattggataatatctaaacattgtatcaaataatggttcaataaagttatcaattgataaatttttagaaattttttgtaaaatttggaaaattaatagtaaattatttggatctttttcattaattgaaattttaaggaaacaatcaattgctaaatcatttgagaaattatggatattattaggattaatcaagatattaacaattttcaaggcagataatctaattgattgagaatgtaattttggattaaaattatcaataaattgaatgaaaattttatcaatattatcaatattattaaaatatttcatattaattagtgaataaattgaagataaaacatattgaattacataaatatctaataattttgagaaaaggaaatttaataatacatcaatatcatttgggaataatttagttaaaggtaaattatttaatatttgacttaataaattaaatgaagataatctaatattatcatttgttgaagtaatgtaaatttgtaatgattgaattaaatctaatagagataatttattaaattttaaataatctgataattcaatgacaataggtgattgaattgatggatcagatgatgatataaactgattaattagttctctatgaccagacatgattttgcccttgaaagaggaagtgggttgagattattattattaagatattattaagattattattaagcgatcaatgaaaattttggtgaataaagtggataatggatattattattatactgggatattatattgatgatataagttactgaaataaaataaaatacaaatgttatatagataaagttatattaagagttataaagattaatcactattagtattcttcttctttttaccaaaagagaagaaacctttctttttttcaacttcaattttacgttcaggagcagtataaacaccttgttcaacgtattgattattattactattcatattattattattattagtataaataggttgaccatattcatcatattgtacttgattattataattattattagcattattattattaaaatcatctctaactctccaacctaaaatatgagattccagttgttcatgataaattggatcaccagtaattgaatattcaaaactacgaattgtatctaaaggtctttcatctcttgatctagttggatttgaaatatcaggattaataatttttgcaccgaaaatatcagttaaaataccattaccaattgaagaatttctattatgcatatttgaatcttcaaagggttgagcttcattcattgcatctaaaattggatcatgtaaattttgggatcttgttttcattcttttctcatcttcatcagtaattttagtatttgatgatttatcatcattatttttcttaccaaataatcccattattattgattactaccttaagaagagaagagagtataataaaagacatataataaacaaatataatagatcagtataagaatatattaataagaatttttacctggtattgatttatttattaatagtgggaaattcgcgtttcttattataatagtaagtctattaataaatttatttatattacataatatttgaaaatattccaatcacgtgactgtcacgtgacttatttattacgtaatagtaattatcacgtgatcttatttggttgagcctcctttatatgattaaattttcccttttcttttttatttacagtttacccttttgagtaatattattattattactattcttcattttcttttgacaattattcttttctaaatactcttttctaaatcctatttctatttctattattattactattattattatgatgttaaataaaagatctaaaattatcaatattagtattaaaactatgtcagataataatattaataataataatcatcataataatcacattacatcattaaaaggttcaaatatttctcttcaagatacacttataagtaatataagttctaatacttcaaatactactacatcatctctatcatctagtagtaaaaactacataatgattaataatttaccatatccaattcaattaaatttccctgctaaaatttctaattcttcttcttataatcaatatgataccctgattcaattaattgataattatatagattaaaattaaaatcttaaattgaattgttcatacataaatattataccttttatataaattaatacactcattttttaatacactaattcattcattccattatagtacttaattctccttcttcattaccttcttcctcattatcatcattactctcttcatatctattatacaatgtaatggttttatcatttaattcaatcttggattctttcctcattattaaattcttccataaatgatgtcctttactttttttatcattatcattattattatcattatcattattaccctcctcttcattaactaatatagtagaaaatctattcttattcctattaataaatgaatattcttcaggtattgaattaacttcatccagtgctgttaaattcttccaaatctcatccctattatcatccccattattatcttctttatcattttcatctttaagacttaatttatcttcaatatctgatgataaatgatgaaatttaattgatctatgatttcgtaatatacttgatttaactggttttaaattaatttcaatagattttaatttagtatcttgctgtgttttattattaattatttctaataattcctttgataattcattattattatcactatgtattgatttatttgattcatgatccatatcatttatctcaatcactggtatagtataatcttcctcctcttcttcattataatcatcatcatacccatcatactcatcatactcatccacatcatctccaccatcttcataatcatccaactccaaacttcttggtgccttatattcataatcatccaattctaatccctttggtgctctatattcataatctccatccccatctccttcatcatcatcaaataaatttctattaaataattcatcagtttcatcaatttcttcataatttatataattaacatcttcatcgaaaatattaaccctcttagatccaattgatacactatccataccattttctaaacctaaatttttcaaaaatttataccttaaattttcattctcctcattttcaacttgttcattacttttataaaatttaattgatgatgtcctattcctaaatgaaaattgtgatgaattttcatcatccgtagattctccactatactcattattattatcattactactattatatttactattattattattattaccagggaatggttcaagtttattggatttttcaattatactaactttaccaactttttcactttcaattaatgaaattggtgtattaacttcatttgaccaattatgtatcgacgtaccaactatcgtctcacttgttggtaataaactacctaatgatcgtttctttttgatactttttaaattattcccattattattattattattgttattattattattattattattaccattattattcttattgtaaatacttaaatcagttaatgaactcttatttttaaggaaattccttatagtattgaattttttatttggtgatttagttggtgagttattggttacatataccggttgatgtaattcagacatggtttgtttaaagaaagaatgaaagtaaagattattattctgttaatgaatgatgacatgttgttaaaaattaaaaaattactttttttatcatgatttcctatttaggaaatttaattaaaagttagttttaatttgttttttattatgtactatattactaaaattcaaatttttatacagttataagtatatataatattgtatatgcattgagggtctaaattatttcttctttaacataatttgataaccacctaaacttaatttttcattacgttctaatattgaattaactttagttgttaatcctcgtataatttgattaataccattttctttattttcaaaaataatccatttactattattatcatcattaatttttaaataacctttaatttcttcatttgaaattaatgaaccaagaataccacaaatatcatcttcatttaattcaaatcttttagataattttttaattgaataatttttaataatacctgcattaacataagcccaagttttcaatgattgaaatttacataatttaattaacatttcctttaataattctaaaccattttcaccattttcattaattgttgaaatacctggcatcataacccaaacttttaaattacttaaaattttagaactttcaaaccaattaaatttaattaatttatgatatgcatcaaatatataatctcttgtctcctctggtggaccttggaaatattgtctttcagtataatctaaaattcttttaaatgatcttgaagtatttttattaatattttgtgattgtgattgtaattcattatttaataaattatttgcaccattagttgaactttgatatgattgtaatgcaattaatggtacttcaattaataatgatgaaatataataaacaatatcaactaattcaatattaacatgtgtatgaaatggtacaaatttaccattttctgaaatattattagtatttaaattattataattattaaattgattattagtattattaacaatattattagtttgattatttaaattattattaaaataaattctaccttgacctaataaatctcttgtatgttgacttgtgacaacttcatgtaaaataatttgagtttcttcaattaaacctgaacggaaagctgcaagacctaattgaacaattgcacgattaaataaaacttgaacacctggttcagatgtatgaatagttgcttgaacatgagttaaatgtaaaatatctcttgctttgaaaaattgattagtaattgaataataatatgattgcattaatgcagctctctttctataaattgatgatgaaataccatttgaatatttataaatatgtgaacataatgaatcaattaaattatttgtatttaatttatttaaattttcatcaatttcacttgaattaatttttggaatattatcaatattattattattattatttaattctgaaaatataattaatttaattggtttataataaatattttctaatcttttaataattatacgattaatttgttcaccttcaggttttgaataattatcaattgaaataattctagttaaataagattgacatctaattataattgaatataattttgaatcattttgtaaagttttaatatattcagaagaatttggatcaatatataataaatgagttgttaattcatcacttaatctttcaacaaatgaagaaattgaaccaccaattaaatgtaaaccattttcattagcaggtggaggtttagtaaaattatcatttgaaggagcattttcagttataacataagatttatcattatctaaaatatctaataatttagaaatatcatttaatgttaataaccattcattaattgacataaatttatccttagaatttaattcataacgtaaagaaattaataaatttaaaataataattttttcataagttgaatttgttaaatctaataatttattaagagtattaagatgttcattaagatcaataccctttttaccacgtgaatcaataattgattgaacaataaagaataaattttcagcagatacaattaattgattattttgatcttgattttcattattaattaaatttgaatcatcctttatattttcataagcttcaggatctttcttataagttaaaacttcatcattataagttttaacttctctcttaattttttgttttaaaatatttaaacttttactttcacttgatgaaagtacttttttattattattttcattcatcttcatcatcatttttagatttattaattaaatcatctaaaattgaaattgctttaatataagatcttggaattaaaatatgatattgattatgtttataagctaatttaaataatttatcaaattcattaccaattttaacccattcttcaaccattgataaattttcaatattatttgataaatttaataattcatctaaatatttttcctttgcagatttaacaattttcttttcatcaccagaatctgaatctgaatcattaccacctttaaggaaatctttcttaaggaaataagatctacctcttggaggagcatcagaatcatcagaatcagaatccgaatcagaatcatcatcactactccaatcatcagaatcatcatcatcatcatcatcatcaccagatgcttcttcaacatcttcctctttctttaattcaattttttcatcatcagatgaatcagataataattcctcatcagaactatcatcatctgtatcatttgatatttgaatattaactgattttttattttgtaattgttttaaataacgttcatcatcagaataatagagagattcttcatcagaagaagtatctgactcatatgaagtatggaaaaagctagacatgctgctaatacttaatatccaattacttacccttgtttatcgaaaagaagtaaacaattcttctaaaatactttactttcaaatttgccaacgacaacgaagtggaaaactgaaatttgaaaattggaaaaattttatttttttcttcactgtaaaaaatatatttaaatacacatctctacaccaaagttactacttactattactattactatctaagacgtaaaccactgccagttgcaccaatttcactgatttcagtaacattacatatcttacccttccatctactaccatatgcaactcctaatattttctcacgtacaatatcactatacaatggaactaaatctcctgcacaaatttcaaattcttcaaatggatcaaaatcaattctaatagcatcagttgcaattgaatcagattttgcttgaatcttcattgcttgttcagctctacttccatttgacataatctttaaaaattcactcgcaaaatatgatgccatattataattcttagctttgaaattttccttcattgcaacttgtaatgcatttaatctatgtgatggttgtaatttaacatgtgtaaaatatgatgctaattctaaatttcttttaacttcatcaactggtaattatcttctagttaattcaattgttaatcctaaaatatattctttacaaatctttaaaatttcaaaacatttctcctccttttcttcttcatcttcctcatttgttaatgataatgtcgcaataatgtaaataatctttctgaaaatcttaatcgattcctctaattgattagatttaaataatctataaccttcttgaactaatttctctaattcttcatatcctggaacatatcctaatggtttatcttcattaatacttgatgaattaatataaactggtaaattattattctctaattctttattttcatctatagtaggaaatacttaatttagatgatgtataaatttccataaaacgttcctttaatggttggaaatttttaatacctgcttgtttatttaaaatatttgcagcaatttcaaatttaccagctgaaatatatgatcctgcagttttagaattcttaatccaatttctaatctcttttggtaatttggaaatttcaattaattcttcatcatttaattcattaatttcagtattatcaatatctaattcaacatctaattcttcatcatcatctaaatcccatgcatcttcaacattaccatcaatttcatcatcaatatcttcatcaattaaatcaatatcattattagatgattcattaatattatgtttctcttcttcattatcatcaatctttaaattactaacatcaccatttaaaatttgttcaaaatatgataattttgcttcctttaatggccaattaatattttcttttgttaatttattaattggttttaatgattcataattataattaatttcagtttcctttggtaatgaaatattatctaatgaaacacctgattcatttaaaatttgttcagctaattcatttaatccattacttttagcagttgcatatgctaatggtgttaaacctgaattaagataaattgaaattttacgttcaatatcatttaaataaattgaatttgtaattaatgaactaatatcttgacgattttctgcaatattagacattttatttaatttatcaaaatctccaattgttaaataaaggaatgataatttatctaataaatgtaattgttgataaactaattcaacaatttcaatattaccttgaattaatgcttcatttgataatttttcccaaacttttttagaattaattttctttgcttcaattaatgcaacatttaaattatgacattcaattgctaaatcaaatctactttcaggatcttgaacaaattgtaatgcaacttcaggataacctgattttttcaaatatgaaataatattttcaccaactaaattagaattagaaataattcttaaaacttcattaaattttttattaattaaagcttttttaaatctatattcagttggatcaattttaattaattcaatttcaccttttctatttaaacagtaacaatttgaattattaactttagtaatataaatagtattatctaaagttttaattgtacctttatcaccatttaataaaacatatttaatatgatttaaagttgaataaattaaaacatttgaatcatcccaagcagcagatttaattctaatagtttcatgcattgacataataatttcaaattttttattaacaattatgattgtatgttttgaataaattgctaaatattgattatcatttgaccaaactgaatattttgcattattcatttgaattgaatttaattcttttctttgttgaacatcatataagataacatttgaattttttaataataaaatattaccaggatttgcaggtataatatctttaacatcatcatctaaagtaattgattttgtaatattattatttaaatcatgaatatctaatttatgatttgattttgaaaatgtaacaaatctatttcttgcaataaaataagcagaatttgccttaccttcacctttaattgaaggttctaatgcaccaacaatttcctttggtaaattaaaataagaataaataccattatcagcatcacctgattgaattaataatgaattttctgatggattataagaaatatttttaattttattccaaggtaaagaattttttttcaatgataataaaggtaatgaaatattatttgataaataattatatttttgtaattgattatcattattaatgaaaaataattcttgaattgaattatttgtaatatttaaagttgaagcaggtctttctctatctaatttgaaaaccattacaccagaatcatgacaagcagcaaataaattaatatttggatgagcaacaatcatccaaaatctatcattttctcttttaaattgcttgaacgggagatcttgaatttaaatcccaagttctaattgttttatcttcaccaacatgaaataattaaatcttcagttggatgaaataaaacacatggaacattattagtatgacctctacaaccatcaacttcccaagctcttgaatcactcattctccataatttaactgatctatcatcaccaccagaaataattcaaaggtaattcaggatgaaatgaagcccaattaacacctttatcatgaccttctaaaacatatttaacaacagcatcagtattaccaaacatatcttgttgaggaattgaatttctattatcatattgattcatcattgaagaatgattaccataaggattattaatattattattattaattgaatttgaaggagctgaatgttttttaattaaattagatatatcccaaactctaacagtttgatctaatgaagcagaaacaattaaatcttgctttggatgaaattgtgcacacataacataatgattatgacctgtaagacaagcaatttctttcctattttgccaattccaaattctaattgtttgatcatcagaagctgaaataatccaaggtaattcattatgaaagaaaacagttctaacataatctaaatgaccatttaatgtaaacatacattttctagttttagttgaccaaattttaattgtataatcatcaccaccatgaaacgaaaattggttgagttggatggaaagcaacacatctaactggaccatcatgatcatcaaatttatcaattaatgtacccatacgataatcccataattgaattgttgaagaatgaagtgagactaataaccaaggtcttctaggatgaaatgcaacacctttagcccttgaagacttagattcaaactataataataatggtaatatgatgttagtattagtactattacattaattaagcaattgagttattacatatagtatacataccttagtaagcatcttcatctctgctctgttgtagaataagaagatccagtgaagaagtacttcaaaagcaaaagccttcactactaattaattacaaaacaattataaacaacgcactgtgaaaaaaatggacacatcaccaaaatcttacgtaatcctctgtctcttattactattactattactattaccatttaaccactgatccatgctctttaggaactcttcaatgttatgtccaactatatctctcggaatggagtacttgatcttattggcattgtgtttctctcgctttaatagtgtcttactgttaacatacctccattgttcatgtaaaaaattaactaaattctcataacatttaattccataactgctatcttcctctaggtctatatttatattctctcttaaataatatgctataatccaaataaatttaataaaattagggaatttaaattgatcattaactctagtttccatttctatcttatgtgcctttaaatgattctctaaacttaataaattaagaaaattacctccaattattaaactatccttaactgttaaaactgaatgaatccacatacttggtaataacagtaaatctcctggcattatatcaacaacaaacccattatttaaataagcatttggtaatttctcttccttttgcattttaataaattctttcctattatattgtttaattaatgatgggaaccaaattttattttgattatcagaaagacaccatttactatatgcttttaaattagaatttaatggtggtatcattaaaaatttcttatgtccacaaatgggggaataatacactgatgtacctgcaaaatcaatatgaaaatcagtaaatgaaccttcaactgacattaaaatatatttttgaacttttggtttattaataccattcctaattaacatttcacttaaattttcatcatttccctccccttcattttcaaataatttactaattatatctaattcttcaacaacttttggtattttaatttcttcaccaagtttggtatcacttatctctaaacttataacattacgtattttatcacgtttacttttctcagttgaaaaatattcacaccatcgtttcatatcccatctaggtgaattattttgtgtcattacatccattactggtactttaacatttgaaccaattttctcagttaattcttcaatattattattaggtatattaaaacttattttaatattatcattataagtttccttaatttgtggatttgcacctctaataagaataggtttaactaatcttgtatcttccaccaactttccttaatgattcatcatcaaattgtccatttgaattataatattgtttatattcattagtagtatcatcatcattaataagacaaattaattcatttaatggttcaattgatttaaaatttttaaaattgttaatttgtggatgaacattcaattcctgtaatgtacttgattcattaagagcagcataatcaattctacgactattcctcccactcctacgagtcatcattgtcatagtattaagtctttaaagaagcttaacctagtaaattgcgaaaaatgttgaaatttccgagtggttggaaaaaattcaatttttcaaccatcaacatgattattttgatagtaggtacttctttctgaacgacaagacagtaacaatgaatagatcatttcataccatatctagaacattacaagatacttcaaagatatcatctgttaaaagagcatttgaatctgctaatagtattaaagaaattccacgtaaaactattgataatagatttataccagatttaacaaataagaaaagatataatccatttgatttttcaattgcatcacaaagatttcaatcaaaaatttttaatgttaaaaaatctaaaattatggaaaattcatcatttaattcatctgaaattaatccattagatttttatacattaccacatttattaagtaattatgttaatacatcaggtcaaattttacatagatcagttactggattaagtgctaaaaagcaaaaacaagtttccaaggcaattagaagagctagaagttttggttttatgagttgtgttgcaaatgatgtttcaacattcccaaagagaggtgattccttgtaaatagtgtgtatataatataattgtacatagtttaaatacctttaaaattaacataaacatcagtacctttaccccaaatactttgaattttaataccaccattaaataatttacaataagttaaacttaatggtaatccatatcccatacctgcaattatatttaaatttggattaggtttaaaattattaatacctaaatcatttgatgcattaatttgaatatcttttgaagaatcaaatacagtatcctccgttgaattttcattattatttttaactgttgtaaatgaataattccataatttatcaattaccttagggtgaataccattaccattatcagaaaatttaaattgtaatgaattatttaatttattaattaaaattaatatattaattggtaaatcatttttatttgattcaattaaagctcttgaagaatttttaattaattcatttaaaacatattctaaatgatcttgaaaatatgggaaaataatttcatcttgaaattgaagtgttttctcagttatatttgaatttttaataattgatttatctttatttataataattgtttcaattttaaaattaatattttcataatattttaataatgtcataccattaacaaaattaatacttttatttaatgtttcaattacatttaatttagtatttaataaattaataccattatttgataaatttaaatgattatttaaaattaatctaagtaaaattctttcacttaaatgaatatttaaaaattcattaactttattaatatcatgagaaacttcccttataccattacttaaatcaattatattatctgaatgaatttctaatattttttcactaattttaacaaatttttcattatcttgtaaattatttattttaaaatttttaacattttcgatttcaactgatccaattaattttaaaatttctgaataactatttaaataatcatttaaaattttattaatataaggattcattatagatataaatcttaattcaaatattttctttaaccttttagataataatattaaaactgtttgtaaactatcatttgcattattaaataattgtgatttatcatttttaagtattttttcataattaggtacaggtgaaacagctaattttgaaattaattgcatatgatttaattgtgatgacttacttattgttgattttagtatgttcattgtgatactaggagtgtgtgttgttgttaagggaagaagttctttcgataatgtcttatcgaatgataatcatttgattacgaaatgactcaatgaggaatattacataatcaatattttatttaatactactatgataatcattaagtcattaaattaagcaataaggtatagatataataaacaaattataatataatataaaatagggaagggaaatgcatgcattaagtatatcaattcaatttattcaagtttactttcaaagacaggtaattgtaaagcttgaacacgaatataagaattttgtctatttgctaaaccagcgaaagcattataccaagcaataaagcaacaataacacctaaaataccaccagcttttttacaatttggaactttacctaaatcagcaattagccaaaagtaggaaagtaattgccaaaaggaaaaataatgaaaagaaagctaaagttgatttcattgtacacagtgttaacatgaaagtgaaaattgaccaacctaaaagatagaaaacctacgtacattttgtaattccacaggatcatcataacttgcaggcaatattaaaccaaggaattgagattgctccgaaagacatccaaaatccaccatatgaagataaagctaaaccaccaaaagtattctctaatgaaatttcccacataccagctaataattgaatgaaatccaccataaaacattgctaaacctacaacaacagaatcatttgaagtacccattgcaccatgcattaaccattgaaagtaacaaaagttgttaaagcgaaaggcagataaaccgaggggagcaggatttgcaaatttatgaattgaaggagcagctaaaccaggattaagattaccaccgaaagcttgcagtaaatcttcctttagcaaattttttattacctaaataaacataattaccatcatttgaagttgtaacttttgaaattaaatgatcagaattataagatgaattattatcatagaggccaacaggtggattgttattactagttgactatgttcaagatgttcatcttgagaaacttgtttttctatatcgttaaaattagacattgtgaattgtgaattgtgaatgatttgattggttgtgtttgtgttgataataatagaagcaaaaaagggtttagtttagaatattttaaaaaaaagagggtacttgtacccttttaaataagattcaaaatctctttcacccattgatccttcttttatttccctaatggacccctctaatttaaaagttattaatttattaataatacttcactataccccaccggaccccctattacttaattctctatattaataatatactacttcactagtggtaaagtttaaattttaaagagcggagtccttcacttactgagattattgccggttaccgataaacggggagtggtaaagtatatagagtataggctattattatgtggggaaatcaccgcttacgtaacactagaaagatccgaatatccgtgaaattgtaacctcactaactccggctattctccaatcttcggtgttagtagtattatctctattatctctattatctctattactgatctttctgataatgttaacaattgttgaaatatcaccaccatcttcttctccttcaatctcattcttaatatcttcataaatatccaactcctctaatgaatcttcaactgatattaatccatattcactacaacatattataccaattgcccaaatactcgtaattattctattagtacttatatcaatattcatgtctttattattattattattatcattattatccttatcatttatatcaccctctatactacttactaccttcatcctctgtaataacattatcataataattatcattatcataataattatccctatcaacctcatcattatcaatattatccccaaattcacttaaattcattattataatcatattcttcttcacttatttcaatccttggtgatttaatattcttttcatttaccttatcatcaatacctatacatctccttaaccttttaactattatacttaataaattcttaactccacctccattaattattgaatcaatcccactctcacaatttaatatatctttaatattccggaaaatttcttcattattaaaatccctaattacacaaacacctcttagcattaccatatgataaaatattctccatttcatataatttatttaaattatcaatccatccttcaacattaatttcaacaattctttcaatatatctaccatatctttcatataaatacctcttacctgctttatccttaattatcttccaaattaatccattcttaccatcaattacatcaattctttgcttaattaatatttcaatcttaccaaatttcttaattccaataatcgcaatcttacttatctcttcatcattatcataactttgtttaattaatgtactaattatccattcctccatctctaaattaatattaaatttcccatttattaaattatcatttaatatcttaattaatctcttacatataatcacctttatctctttattactataaacactcattttttcaattaatattcgtatcttataatctttatcaatttcaatctcattagcaattattttctgtaattcaatattacgttctttatccttaattagtttcaaatattgaatcataatatccttcccttgataatatcttaatacctcgtttattactaccaatctttgataaaaatttaatatatgaccatgttaaacttttcttaatcctttcattactgaataatcctaatttaatatctccattgttaccattacttataccaccattaagactaatactatcatcatttctaattatattaatcgtattattactattattcaaaaaattcataccaccttaaattattattattattattattaccaatcctaccccctcttctactaacttcatttaatgcaattactaaatatctcacaatttgactatcttgtaacatttcaataccttcatccccattattaactaatacttccattaatgaaatcccaacttcaatataaactttatttatattacttattaaatcaccatcattattagcactactattattattattattattactaatataaacaaatcctgccttatgtggtttataaaatgatattaatcttttcaaaaatttacttgtttgatgaacttcttcaaatcttttagtattctttaatatccctttaactaatataattaataatatcccaattccattccttatattccttagttattaatacattactttgtataattaatggtttaatatcaatatcatttggtaatttctcaaaaaatttaattaaatcattacccttaagtaaatcattaattgataaattttcattattgattggtaatttaattatcttacttatattagataatgttgtactcttcataattaattctaaactaatatcctcatattgaatactcttaattttttcttcctctttcttcttcattaatgattccaatttattctttaatttaaaatgtctctttgtttctttctcaattaatttattcatatcattattaactttttcaatattaaatttaattatatcatccttatcaaatataatattctctaaatacataatttcactaattaataatgatatccacctagttgctcttttatcattttcataactgtcaaataatttctctaaaataccaactaatccacattttaaacatgcctttaaaaatactttaataaattctttatttatatcatcttcatattctggacaacttctacctctcatcttattcttaatttcattaatatttaatttctcattatcattatcattattatcatcatcctcatcatcattttcattaattatcttaattccattggtatatttgaaaattatcttctcccaatcccataatacatttttctcttctttattaccaaacattgttaattttttaattcttaatccattggcaataacactcataactaatgtcctaacatagacttgttcagaatataatccattaattaatgttctcaaattcttataattatcatctaaaaataatcctaatcccgtccatgtacccattataatatttaatatattaattaaatgttccattcttaatttattatttaaattattaactaatggatcaattaatgatgataataataacggtaaaaaattacaatcaattaaaagtttcctcctatctggttcattcagtaagtatattatagttggcattattgaaattgataaatttttagttattttaatcatatcattgtttttattgttctttatcttagcactatcaccactcttattttgtaattgataactgttcaataaaaatggtggatcaattaagatttgtataatatatttaattataccacaatcataacttaattgtggatctttaataattatctcacataaaaattcaataattgatatcccaataagtatattctcattaaatttaccatcttcaatactttcaatattaatcttattacttaacttaatcatctttcttaaaacaaatttatcgaaaaatattaatccttttaattcaattactttccttaaaaatttaatacattcaattacatcaattccaatatcttgtattaaaatatcacaaataatagttattaatggtttccatttagatactttagattcattcattgtgggtatatgtaattgtcttaataatggttgaatactaacattatttattgatcgatttcttaaattttcaacttcaattatcatcactgttgttattatcatcatcaccaatcatactactagttctaacacctctcataccatcattatcatcgagactaatattatttattgagcttttaacaactgtatcaactttatatggactatcaacattgtaaaaattaaataattcatattcttgtgcatttataatatcattattattctcttctaaatctctatatttaatataaggatatttaaaatatctatcatgatgataaaatttaaaataaaaatagaaaatacttgcaatatcattaaaatttttacaaaaaattcttaataatctaaatccacaagctttaatagatttatgtttatttgaaaacattggccaaattaatgggattataatcatcatacttggcatctttaattcttcatgaaatttaggttttctcttcaataatgacaatatcatatatttgattacttaattcaactataagttcatcaatttctgtatcattatcattattatcttgttgatgctgttgtttattatcatttttatcgtgtttatcttcattcactgtattttctgtataatgatcagatttccatatttccaatagtttattgatagtagtgtccaatcgatattgtcgattcaatccttcaccaccatccatatccaattgatctgtggagtaaagtctctctaaaaaaaggagaaagatctcatcaacatcagatctatcacaatgatgatgcaatcatcaaagattcatgaaagttaaaaaaaaatcgttacgtaatctatttaaaacctatttaagtactttagaataattatattcaacttcatcaatcattttctgtaatccaattataacaaattgatgagttaaattagggaatttatcacgatgtaatccaaaccattctagtggtggtgttgcattacctaaatcctttaattgaggtgtatcaatttcaggttcattaattgcaatgtaattgtattttttatcactttcaacattcttaattttatcctctaaattaattgattcaattgttgattctttataattttcctctaattcttcatcatattcatcaaatgtataaaatcttaatgctgttaatctattacttaatgtaattgcatgtgaataccacatttctctaataaaataaactgatccaattttccatttaatgtcaactctaccatcaaatttacatttaaaattatatttaattatattttctccaagtttttgaattgttgtcatttgaacttttaatgatgggaaaacaaatatattatcagcaattgatttacttgtcatatcgatatattgttgaatattttctggatttaaaattgatttatcagttggtgtttccttaaaacttgaaagtgaaactttaatatccgctaaacttaatttaatatcatttttcataacatttaaattatgttgataaaatttaacattatgttcaccaattttaataactaatgcttgtggatctaataaactacttggaaaaatttgaatttcagttgatttaacattaatatgaataaatgtctctaatttctcaattaatttcaagaaggtatcagatggaacattattcaaataatcttttaatgcaactttcctcttggatttatcagttttagtaattaattcaatattggataatccagatgtttcaaacatattctcttcaaaatcatcaatattttcatcatctaaattactttcactttgtgcctcattaagaacttgtttgtatgataatttaatatcttgtctaattcttaaaccaattgtataaatatcaacaaaatttgacgcagttaatgcagtcatgaaaactttaaaactttccatattaataccaaattttagaatatcattctttttaagtttcctttgattataaataacaatttcaaatttaataatttgtaaaatgaaaaatggatgataatctaatgaaattctagtttctaaattttggaaaccagctgatactaaaactaatggtatatctaatgctctattattaaatttccatgaaattgcacttgtaattctaggtttgtttaatactaatgtaccactcagtctacccttagattctaaacaaattttattaaattcaaccttaatattattatcccaatttgatgattttgtagaaattgcaactaaatcattaatatcaatacttaattcacccaatgaactacctaaatcaattttacctgtcattcttctaataattaatgttaaaatgaatgcaaatgcagaagttgtagaaacttccttcaacattgatgcaaaggttttcttttgaacaactcttttgtttttcttaataataactaaattatttgaattattaggtaaccaaaaattcttaaataaatcaagatcttgtctttgttggatattaataaataaatcaacactatctaatgttgcaactgtagagaattttttctcaccttcaatcattgccattgtacctgtaattgaaaattgatttaaagaaatagaaccacttctaacctttgaataaacatgtttcaattcagattttataccacttaacgataacacagcagatacaaattgatgatcagttttaacaattaaattgatttcatcaataataacttcagcttcaatattagctcttggttcacatgttaatgttaatgattgtggttcaattttaagggtcatgttaatatcaattttatctgtgaacttgacaaaatcaatagcagatgtgtttctttcagtagttgtagtaatcaaagatttattttgtttcattttatctctagtacttgaattcctcatcatagttttggtactgtcaataatatcttgcaaaactggaacacacgcacatgacaatttgttatgtgtttctgaaatcaaaatactcaggaataatgaatgtttcttaaatgtattaatatcatgaacgtatctcattcgcagctgatataccaggtgattctaaacttaatactggaattaaaccgtcaacttccatattagaattaaagataaagaatgaggctcctccaaatttaaaagcacatctcaaaatagtaacctttttgttactaaatggtgtgataggagatataggagacgtaatttttgtttttgaaactgtatgagtatctgataacttatcactaatttctggttccttactttttctttctaatataatgttggacatgcgaatatctgtcttgaagtttatcaatagttttccatacatgttcagtaactctaaatatattcgtctggaatttaaaattaacagtttcaccatcaacttttgccctgatttgattacttttttcatcagaagtcaactttgtaaatcagtgtaaaaactgggaaataaacacgatcattgaatattttttcacttttcgttgaataaaatgtagatgagttaaaaccatgagccgttgataaatacataccagtacttataatcttaccagcatctttagcacaaagaatcgatgtcttctcaaacccaaaaataataccaggtgcaattgatgtgtatatttcatcattttcactaaataaccaaccaaaacaaacattattcgcaacaattgatatactgaaaaacgatagtattgtttctatcgtatcttctaagttagccgggttgtcttgaacaacatcttttttggctctaggttttagatggactgcaactgcaccatatgtttcaattacctcctctaatattattggattaacaactgcacggaaatgtgatgatgttatattaagtttttgtaatttatggctcggtaattcaggattgataatctcaacaatagtttgtaaatcaataattgtactaacaccatgtataccacttaatgtaataccaaatgtgattgatgggaaagaaaattttccaaaaggtgaatatctgtcgagtttcctgtcaaatgtttgaatttcaaattttggcttcagacaatcaaaatgaactttatttccattaatagctactacagaagtgatattgttgaaaccaacattcaagaacaagtgaacctttttgaagatatcaattttttcaaggttcttcaagctctattttttgtggaatagttggatctaatttagactctacttttgaagatgcagttatctggtcaatacgcttttgcgccttttcaatcttttgaattaacaaatcccagttcttttgtgcagttgatatatcactttgtccctctataatcacatcaattaaatcattgtgtgtaaaatcaagtcttacaataccagctaaaaatgtgaacaaaacaacatgtgcattttctctatattggatcagtgatcataaatcttattttgtcaatattagttgagaagtattcaaaaatgtattttgagttttgggaaccaacaaaccatttagaatggctaacattatactcagtcaaacatccaaaattacccaatttcaatgatacactatgatcttgaatttcgaaattagcaaaaaatggtgataacaattcaatatgaaccaatatttttgatattttaagtgaaacagtaaagtcaaaatcaaatttttgaaatatattgttctcaacattatttgatattttttcaaacgcagatgtttgctttgaaagttgcgagttgctatctgttaaatcttgaagcttattttcttttttcaaacttttaagtaagttcaaaaacgggaacaatatcactctcaacagtttcatcaataatgttcagaacgtccctttgtatcaggcaaaatactcaagttgacaaaatcattggcaacaaataataacgtttttcctgttttaaaagaccctgtatttaccaaactagttgtatgattttcacaatgaatctcaaacaatggagtattagtaaccaaaaattcaatcgtaaaaaatgtatttttgaagtttaatgtacaagacataatttcggctgatttaataatggatgatgtcattttagttccttgtccataaaatgtaagaattgatttattgattccaaaagaatgtgaatattcctcaatcgtaaagttggtggtaattaataatggctctgcaggttcatatctttcaacctcattcaaggatgtagttgaatccatttcatcggcagagctttggtttataacttcattcaatttatccatagcagaattaatgttttctatcgtagatgagagctctttgaatatacataccaagttagtaaagtttgttataatagatctgattttgacagttacatctaatcctctttgaattggttgatctaacaatggtaatgcaacatttttaacaatttcttctaaataatcttcattgaataaaacaaacagatccttcaacaggagaacatctttaaaaggttttactgaaaccgtcaaatttttcaaagcgaatttacatgtatgcagtaactttcttttggccttttcttcaatttcaaaaacagttctgaaaatgaaattatctttagttttatgattatcccaacatctccaattaccaaaaataacagcaacttcgtcctctgaattttttggagcttcccatatcctatctttatacatttgatttttcacttcaagccaattagttggcagattttgcataacatgcctcaatcttggaataatcatccaattaccatccattctaatatgattttgacagaaaccggcaatgtaagaaggtttagtgatacatggaggatcatgactaatattgtaatcaataccacctctagataaatcataaagtagttcacgcattgatttttgtttatcaacttgaaattgtttccaagaggttaaggctttattaatggatatttcaaattgtaaaccccaaaaaattaaccatgctatatttgtagggtcaacaaaaaatgaaatattttcaaaatcaaatgtagttatatctttggtatcaatagacttttttagcaaaacattgtgaagagaggtagtaatcacgtctttttcgtcttttaaaacatcaagattcacttgattaaccagggtgtacagattgaatgtgatagattcatcagtgtgttgtttcgataatgaaataacagaatctcgaatctccaaaaagatataatcattggaatcaaatgagtcagatattttcagagtgaacaaagagaattgtattttcatctttaacacatcgttctctttttgaaatttaaaaaatgtaagaaaatcgtcttgtaattgatctaaaatggaatgcatactaaaatcagtcatatctgaaataaaatcaacaattataggagcaattgcaggtgaaacaaaaatttcaaagttaccaaatttcattggaatagtattatatgaacatgaaggatctaatgattttaaaatctcaaaatcaccaaggtttgaactaaaactgaagaaatcatcataatcttcatcattataatcatcaaaattagatgcaacattttcaagtctctgctgaatgtgagctggcatactatcaataatcatgtcaacactttgacttgttacgggtaatggtggatctggataataaattgatgaaactatagatttataacctttgaaatattttctatctttagcaaattcaggaattaaaaatggagttctatgaaatggtgcatcatgctttttaagatgcatagcttgttgtttcatacgttcaaatgcatctttcttttgaatgaaatttttaactccgacagatgttattaatttcagaaccatatgatcaccattgtaaccttcaatacttattttatcaattaccagtgtaagtaatgcgttgtagaatgtggttggttgatcagttaatttgaagaatagttcattcaatccgagtttgaaagtatagttgtttcgtttaatgatgatattgagatcaggacatttaaaagagaggtttaatatatccatcacaggtatttctgggattgaaaaagaattctccaagtcttcatgaccagccccgaatgacataccagcacgagttaatgcgtttaaaaatataggttctgcttcaattttaatattgcttgtgttaaaatcccaacgacagtaataagttggttctgatggaggtaatccaaatattctaatactatgaatggataaatcagaaatagaaatttctgggacaaactgtacgttctttttggtattttcaaagatgatagattcatcacacgaatcaatatatcttccactgatttcggaaaagttagcttgtaaatccatataatagttattatttctcatatctatatccaaattatcaaaatgtaatgctaaatgtgatgtacaatcgtataaatgacaaggaaaaatcaaacacccattattaacttgaaaagaaaacatcaaatcagtttcatttttcaatcttttaccttcatcgaaaggttcagattctccatacatttccttaccaaatgaatctctaaactccaacaagttttgaaaatgtgtatgatcaccaaaataattatcctttaatgacatgaaatatttgattgcaaaaccgtaaactttaacagtagtatcactacacgaacaattcataatgatagtatcgcaagaatcaatttccataaagctgtaaattgtatatgatccttctaatttaaagtcagttgcactaccaatttgttcatctttcatgaaatttgaaaaagtactcgatgctggatgttcaacagccagatcaaatcctgtagtttctaataagtattcaacagtatttgattttttatatacagttgtcattggaactttgatatctacaaacatgtatgaacctgtaaaagttaagtatgtattaacacttgggtctaatggattattgataatgtttttctcattgatgttgaggtatattgcatattcataaaatttccaattaaagttgtaaataaaaggacggaaaagttcatagggagttggatcaccggatccaaaatcagtcaataagtctgatatcaaagtaatgtgttctctaagtaagtataattcagcatttttagaaatgttttcaaatttccagttgactaaactattccattccaaaggaaaaggaatgctaccattcaaaatatgctcatcagcttgaaacaacacatcatgattaacactagttgaaatttcaggtttaataaatacagcattcagtttattatcagtacctctttcaagtgttggaatcattgatatataaaaatctataattgaaccttttgacattttcaaattaaaccaaccaaaatgtcttaatttatggatatcatttttcaaataaagataatccttactttcttccctatgcggtattctgaaaatcaattcatcatcacattcaaaagataaatcaaaactgacatattgccttctcattccagattctaattttggaaaaggtacagtatctctataaagagatggaaataaaagttgatgtaagaaacctctattttttcaggcccatggaccgtaacaaatagttgcaccatacacaacaatatccagaccaagcataggaggagtatctttattaccaatatcaatgtgatcaacaaaatctgataatttttgctttgaaggtactaaacctggaatatcatagtagtaattaatgtgacatgttgagcaatcaactatattcgaccattttgcatattctgtgttgttattgttgttgttgttattactatgattattagtatcatgataattgtggttatcactatttgtggttgagcatcgagtcagccgtgctatccgaatcactggatgagtgtgtcgttaaatatctttccaaacctttccattcagtttcagagtgagagttatcattaaagtatgaatattcatcataactattaaaatcattcatcttgttgattatgtgtgttattatattgggaactatcaaaatagttacttaactttaccaaactatgtttaagacccgacaccatcctgaaaaatctctttgatttcttttggttacttaatctatcaattttcctttccatagtttctatatttttgaaagatacattaggtttcatatcaattttgagatcagatacagtgaaatcataatgcgtacgataatgatctaatgaggatcctggtaacgcagcatctatatgaccagaaattgaagaatatgatgcaacacataaacaaggagttgtttcattacctaaaagaaaagaacctttagatattttaatttcaaatggtagaaagtctaaaaatctagaatccatagtttctgaaactaaagttgatgcaacactttgaagatcatcggaattatttgattcaacatcactaaactctgtattttttccttcaaatttaataggtatatgggtattatttgaagaatctgaaggagatgaatgtctttgagtagctgaagatgtattcgatgataatgaagatgtgtttgattgaaatgtggtatctgatgtattttttgaatttttcatatttgttttaatattcatctcatttttaagtatagcttcaatattatcatatgaacttgatttattataaacgaacatttccaatccgacaatatcaagacaaaatcttgaaggtaattttttattagcttcttcatttagttttttcccctgtataaagaattgtgattttcttacaaattgtaaccaatatttccaagtgaatacagctgtatgaataagtataagttcatttggtgttacaatcataacatttttaagaaatatacgacctgctaataaatttattttaattgattgtattgaaattttcttatgatgtcgccgccatagaatattagtgacaaaccatgtcactaaattacctattattctattgaaatagaagataaacataattgaggcaaataaaacaataagccaatccaccagaaagacccaattcaagttgatggtggaagtgactgatctagacacaaatgaggatgtaacatccatcttgtgagtatattattgattgttttataagttacttgtaataatccaacatttaaaagaattctagcttattaaattgctatatatacattaaaagcctaaatttaaatattttcatgttaactaagtgagcattaaatttgccacttgaaatttccgaaatttgcgagaattttggatgggtggcaaaagagatcgtttggagagtttgagaacttgttgattcgattctgaataaggttttgttactttggagggtataccagagaacatgtctaacgatccatttaagaagccagaaaaggattttactgaaacattgaacgagcagtttgttccaaattgatgctctcagtaaagctgaatataagacaggattagataaattattacttttaggagaagcaaacaagacaagcatctgatgttgcatcttccaagagagttttagtaaaaatcattgatgttcttgttaatgccgatgattggccattattagaggaacaaattgtacaattaagtaagaaacacggacaattaaaggattcaattcaatcaatgatgaaggaagtaattgaaaatttagataaaattaaggacattgatcttaaaattaaagtaattgaaacaattagagttgtttgtgaaaataaaatctttgttgaaattgaaagagcacaagttactaaaatattaagtgatattttattaaatgaaaagaatgatttagataaagcatgctgaggtattatctgaattacaagttgaaacttatgcttcaatggaattagaagataagattaaatatatacttgaacaaatgaaattaaataatatgagaggtgattatcaattttccaaaatattgtcaagaaaaattttaattagatcattagagaaattttgggaattaaagttaagatattatgaattaataattgaaattgccaaatttgagaataattatgaagatattgttaaatataatatgagtatatacaatattcctgctattcaaggtgatcttgatggaaatctcaaatatttaaaggaaattagtaattacttaattttaacaccatattctaatttacaaaatgatttaatttcaagggttttaattaataagaatttaagtaaattaccgaaagaatatgaactaattcatttatttactaatgaagaaattacaagttggaaagaattcaaaactgaaggtttaaataaggatatatttaatgaagacacagaaaagggtaaattacatttagaagatttaaagaagagagttattgaatttaatttaagaatgatatcgaagtattattcaagtgttaaattagatagattatgtgaattagttgaattaacacaacaagaaactgaagattacataattgaattagtgaatagaggagaaattcattcaaagattgatagacctagaaaaattgttaaatttatcaagactaagagtgaaaatgaactattaaatgaatggagtcaaaacattgaagagttattagaaaatattgaagctgttcaacatttaattaccaaggaagaaatgatggctaaatagaatagtttaattatgtattacattttatataatatatttccaacgatcatttattcagtattcctctaaaatggattcgtagtttttcattttattatagtaaagagtatttaattgaactaatgattcatttatttcctgttgtttaacatccggtttaaactttaacaattgtaattgatgttcaactttagttatttgagcatcttgtttaatgacgaacttatcatcttgtttctgtacatttaattgatcaagtaattcagatttaactggatcaggaactgtgttattagatatacttaaattctccaagtaaactatcttattattaatttgattctttaataaatgtaatgattccataacattaaaatcatcattaatatccggttgttgattagttattataatatttaattctgctaatgataatttatgaaattcaatagatgattgtatttgattgttaagtaatgctctatgagctttattctcaaattcataaaccttgtaatatatatgttagtatttgttacagtaattgaaaagaagacaatgatacatactcttactagttcttgttgcatttattgattcatttacaacgatttgatatgacgattggctgataccatcagaataataattttgatttccgggcctgatttcctgcttttgaaaattgaatgttcctcacactatacaaaattaatgtggaggttagctgttattattaggaaagatgcattatttttccggtatacatttgattgattgtcttgtgaagtaatacgaatatggagtcaattgaactctgtattgaggacgtgaatgttgagaagttctgggaagttgcagatgatttattgtataccaaaatgtattacgatcgtgatactaaattatattttaccaaacgacgagataataatgataaaaatgataatgatgatgatataaatgaggaagaaatgaatactttactagttagttatattgcattgattgttaaatattatgatggtgttgcacatttatatgatactgaacaaatatttttagagaaagtttcaggatttttacttgcatttccaggatttatcagtaattatgatttctgtgtacgtaaattggcatcattaatatgttatgcagctaaaaatacaactactattcctacacaatctaatgaaactctattgattgtaaaggttgttggttggatcttacatagtggcggtgaaggtaccattgaagtaataatgaaatgtggcggtgttgaagctatatccaaatcaatttcattgtttaataataataccaaaagtgtcttcaatggtataatacgtgttattattgatattttcaagaaagatttaaaacagggatatgttattgcatcatattttgcaccatcgacagtacaaaatatagctgattcacttagggtaagatcaagagctgaagatgaaagtaattatatttgctttatactaacattgttacttttttattataatgacgaagttgttaatataatattacattcacctaagagaacagctgttttcacagaattattagtactggtatttaatagagatgatgatcaacttttacagagacatgttgcaattgcattatcacgtactgcatcacgtttatataccaatgattgtaaagttgttgttgatatattattaagaaaattacaggaaggtgcagattcatccatagataatgatcccttaattatctcatatgtttcacttttacatcatttacttattgaaagtgaattatctaatcatcgatataaatcacaggaaattgcacatgttttatcagttttaatcaattgtgaacattcatcattagatattaaaatacaggcaagggaattattacaaaatcataatacaattgtatcacaaccatctacaccccctcatcggaattcattgcataatcctcattcggcatcattacctgatttaaccaacgtaagagcacattctcaatctcatactcatactcaatctcaatcacagatattgcaaccaccacgtccaccacctccacgtagaaaagctctttctcatagacatacctaactaagtatagctaaatctatgtaataaaatgtgaaaacccttatcaacaggaaatacatttccgaattactactagactgactcagaataaagggtactaaaacccccggaaattacccttttaggcaattgacgatcctttaccgcccaattttccatttttttcaaattttcctcatttttttcttccatttcttcataatcggtgacacattattagtgttaaatttaatactattattgctgattgataaataccactcttctttcattcttcgtcttctttacccgttttaaacatttccacttccatttaagcgttattttagtctttatcttaaaacgctttttttccattactcaaagcttattgattaatttatttgaccgctgtattatttttgcacaatacacatataccttctgctaatttaatgttgaaattatcttcacctctattatcctcttcaatctcatcttcaaaatttaaattcttgaagttttcaattcatcattcatcacgtatgttaacatcagtaccattagaatctaccccttcatcattaaaggaaatcgcttcagcaaatttcactcctgctcctcaattaaaggatgatcaattaaatcctcatgctttagttgctaaatatgctgttcgtggtagaattccaacaatggctgaagatttaaagaaaaaattgaaaaatgatccatcatctgtaccatttaaaaagattatatctgccaacattggtaatcctcaacaattagatcaaaagccaattacttattatcgtcaagttctttctcttattgaataccctgatatgctggatcatccggaaatttctaaaattttccctcatgattcaattgatagagctaaggaaattttagcaaatttatcatccgttggtgcttattctcattcaaagggtgttccatattttagagaaactgttgctcattatattaaagatagagatggtcatccttcaaatccggatgatatttatcttacagctggtgcttcttcagctgttaactatcttttaagtttattatcaactggtaaggaaactggtttccttatcccaattcctcaatatcctttatatactgcagctcttgctcttaatgatgcttcagtattaccttattatcttgaagaatcagaaaattggtcagtttctgctgaacaaatggaaaaagttataactgatgcaatggataaaaatattaaacctcgttgtattgtcttaattaatccaggtaatccaactggtgctgtcttaactgaagattcaattgctaaaatcattaatcttgcttcaaaatatggtctggtaatcattgctgatgaagtttatcaagaaaatgtttatcaaggtagattcgtttcagttaaaaaagttttaagagatttacaagcagttgataatgttaaatatgctaatgttcaattagcttcccttcattcaacttctaaaggtatgattggtgaatgtggtcaaagaggtggttatatggaattaattggtttccatgattcagttgttcaacaaatcttaaaattagcttcaatttctctttgtcctccagttattggtcaagctttagtttcattgatggttaacccacctcatgaaactcatccttctcatgatcatttccattatgaaaagaataatatttataatgcattaatggaaagatctcatcaattatttaaagcttttaataaaatggaaggtgtatcttgtcaagaacctcaaggtgcaatgtattgtttcccaagtttatcattaagtgaaaaggctaaagctgcagctgttgatgcaggtatggaaccagatgagttctattgtgctaaattattagaaaatactggtatttgtactgttccaggttcaggttttggtcaagttccaggtacttggcatttgagaacaactttcttagctcctggtactgaatggattgatgattggtctaaattccatcaaaaattcatggatgaatacagagactaagtaaagttttataaactcaaaaactatttatttactttatataatcatatacttatctatacattcttcttactttgtttaataaaatctccagtataaactggtaaaatactaactaaaagcatacaaacccataatggaatccatataaaactaacatataaccatgtccaacattgtacacgtgtataacttttcaataaaccagtaaaaatatcaacaggtccttcaagtaattcatttaatgaagttttatctaaaaagtcaagaactttctgaatttcacgctctaataatggcattgtaaaatattgtattaaatttcttagactatctaaatgagcattaaatttatgaagtaatccaaaaatcattaaccatgttgcaggacatgtaagtaataatactaaacaatttttgaaacgtaatttaaaattactctttgttgaataacgaattgaaaaaattgcagagaagcaaataccgataacatatgaaagtgaaaaatttaaaatcatcataccaaataatgcataccccatgaaaaacatgcagatcattgttaatgatctcgaaaaatcagaatgaactctaatactaagaatatttaataatggattaataatgaaagtaccaatgaaaatcagtgccattgatggaataacaaaataattatatgttaaattttgataatcaaattgaatcctctcccttgtgataatattggaagtgtataacccatatgctatgaaagttgatgttattatcaaaaaggtaataattgaacaaatcattggaacaaacttaaatgtgaatttcttcttaaccacttcaatattgaaatctttataactattaccagctgatgcattgaatccatcaactaaagaatttaatgatgcaagaatataagcaattgaaatcattgctccatatggtaaatacataccaacagaaacaaaattctttgcaccaagtaacaaataaaagaaaaaactttgatggaatttttctaataaattattaacacttctcaaagtactttcaataactctaccaaatgaagttatatcactattatgaccttcaactccacgtaatctaattgcttgaacattccatccactaaaacttttattatcaccgtattcaagaataccagaacttgcaattgaaaataatccactaaataatgatgtaactctactataaaaatcatttgtccataattggccaaatggtgtattattaacactaactctaataccttcattttcagcaatatgaattgctgtattgattaaatctaaattaggcaattgtccattaatacctgcatattctaaatcaatataaccgatataatcacccgatgacggacaatcaacgacaattgcacattctaaactaccagcagtattttctaatgttgtgtgatatgcgttaacccaatatcttaatgattgctcaccatcctctgggaacactaatatcacatttttagcccaaatagataatcttcttaaatatcttgctaatcctattgataatgataaaccaccaacatttaatttactttcaccttcaaattcactataccaaggagttgctaataccattgcttcagtatcatcaccctttggtgcatgataaattgcataaagaatacttttctcagtgcctgtctcttcatccataaattgaacaagatttgttttataccccatttcaattaataatttatttaaattatcattttttgttgtaatattatcattcatcatgttaacaatttcatttctataaccacgtacaaaattccattcactttcacggaaatatgaatgcgcttgacctggcattaatgcattctcactgaaatatgtatgtctatattcacctgtcattgataattcaatcatcataattattgatattattggaattaagaaacataaccatggtaatgcacgaattattttctgtaatgcattctgatcacgtagtttccgttgaacaatttctagtaatgccattgtctgcttattataattgttgtaatgttaagaataaaaggaagatcttgaaaagtgttgattataaattttatatatctggctgtgacgtttactaaacacgtctcattttcatgaatttttaaaatcttactatataacacgttgtatcattcgaatcaattgctcttcatatatttttctaatgcttggtgattacactaaacgtattttaagatgtatgtattgtttaacattgagtacttataactgaaagagttgtacagcttaaggtaagtgcatgttaataaaattacgtaatatgctaactatagtcgtttgagatgtagatttattaaaattatataaatagaagttatgttctataaatgggtagacattggaaagtaaatgaatagaaaaaagagtctaagcattagtactgtcttcttgggtacttggttcgttatcattagtggtagtgtgacttagtgttatcattattattattattggtatcatttgtattatttgtttcattatcattattattattaccacttgaacttccagaacttgggaaaccatccattgaatcaccatgaatttctctagtgactacaccattgggtgtacgacgactttcaactccaagaggtgggaaaatacctccaaatgttggttgcccacgtgtaacttgtctaacaacgggaatcatactaagctggttagctattggactttcagttctaattgatcctgttgaagtatttgtggtagtagtaccatcagcaggtggagctgcaatagcaatagatgcaggacgtgttctatcagatattgaagatacaacatctctaataaaactaatcaatgaatcacgtaatgctgatgatggagtatttgcttcattgttggaattcacagtgcctggagtatttgtttgacctcttgttggatttctgttagttctgtcaaagatattattaccattaggtgaaaataaaagttcagcaggatttctagcttcatttccagtagaatctgtactttcattattttgttcaaaatcttcctcctcattttcattagtagtaaaagttatttgtctattattgaaattctctataaatggtctgcagttactaatgacttgcgctaaattaggtaacgtaattgaaatgcatctagattgttcatgattaagttccattattgatggtaatttttctctacataatggacatgtattattggttttgaaccattcacctaaacatgaagctccaaaaatgtgaccacaatccagtttaactggataatgtgataattcctttttattaattttttcagttttctttgtttcgggtttctctactgttattttatcaccatcgttattctttatacgttttgcagatgacaaatcacttgattcaagattatcattgttatcattatttgataatcttcttttatttttattgtaatcttccttttcaacagtatttatcgtaacaaattggacagtcttgttcattttcttttaaatcttctaatttgacaacttgtaatttttcaaatgtcaattttgaaacacctgacgatttctttaaagtgaacagcaatagttcgaagtgcaatctccgttgccaatcttaccaaaacactaacattctcctcatttgtttcatctatacttggaacatataacaataatgaaccgacattactttcatttgaatttcccccataaacataatttacagtaaggataatatttcgtgattcagtattaataagtgaaggacttgttggattttctgagttattattagcttcaatattatttccagtactatttgggcttgtattattattattattattattattattattattattattattattattattattgtttgaaagttgattaatttcattaacaggggatattggtgcaattcttggaggtgattgacgatatagacgatccagtactctctgtaaaggcgctaataatctagatgttggttgtgaaggatcattatataaaccatcatttgagacatcgaaggcagggtaatctaaacctcgcacaccactgttattagaaatagtattatgttgagggattgctagttcagtagatgcattggtggaagtagatggttggtcagtgatagtctcaactgctgtgttattattattgttgttactagtatcagtaatatctgtagtggaattagatccattatcgttattattgttattattagtagtagtacccatatttccattatcaattgtaggagttctttctctactacttgcatccgccatagttctgaaaagttctgaaacagttcttgtagatgcattagatatatcagccaaaggtgcagtaacagggccaacttcaatggtcaaactgtgactatttctacctctttgttgaacaataacaggtggtaatatgtagttcccattttcatttcttgtgatacctgactcttcaaaagaaccgggagggttattctgagatatagttagtagtggtggttgtgtttgtgaagacatgtcgtcaatagtgtaaaaagaaagagtataactaagtaaaagagagaaaagaggatcagtagcagtgattaataatctataataatacccagtcaaatggacatcactcgtcacaattgatagctgagggattctttttctgagatttgaaataaatctcgtatttcacagtattaaatttacgggttttctatttacatttcttttcttttggatctgtagtgtcttttttggtagagagtaattgattacagtgtctcaatactgggttattctgaatagtgatatatcacattgattaagttgtaattgaaaagaaagtgttgaaaaaaatgggattacacagtgatgattttgtgttaacggatgagttattgacactatccgaacttttctctgatgttccactatttcatatccaacatcttcttgagacatcaaataatgatatagatagtgttgcagaacaattgttttcctatcatttgattaaggatgatttggataaaatttgtaagtgaaaaggagaattttgtagagaaggcagttcctgagaaaccgaaagaatgggttttagttgaacctcaggagaaaactaaagagaaaccactgggtaaaagcaaaagaaaagaaaaacgaagtagaagaggtagcaggaataagaaggataaagaaataccaaaaacgaaggagaaagtagcattaaatgttacaagcaagtttccatcttctgataatactaataagaggaagaatactgacattcctaaatcttcacgaaaacattcttttggtgaaagtacaaacatgcagcagtctgacgagaatatgagtaactccaacagttcatgttttgataataatagtgatactactagctctatggggagttcgaacagtacatatgatgaagaaatggaaaaacttagtaatcaactaaaggcatcaagtattgatgaattactggaaaatatgaagattgaacaattatcaatgaaatttgaattacgagatacaataaaggatctattaaatgtggataataatgaactggttgattattatctcgatagaaataattgtgataaacttaacacaatttatgatataatgcttaactatgatgattcagtacctaaatcagataatactaatcataaaattgaagaaattaactttcaatggggagttcatagaggtggtaattcaatgtctgaagtgcttaaaaagaagatgaaaaatataacaatttccgattctgatgcttgttggtttgaattacagacattgattgatgctaatccacaacttgaattacccaattcattttatctgttagctatcaattggtttgataaagatattgataaggtgttgaacttggctattgttcttaatgattgttttgatataaaggaaaagaagaaacaacatatgatgagacaacgagaaagagagaaagaattaaagaaactgaatttacaatttcttcaaggtaaagaaatggatttcacagttgatgaattgaaaaaattatcagagctcgataaggaacattttgatctttatttatctgagaataacgaaaattctaaacattttgataaaaatggattttattatgtggataataaaaagggtaatcaaaataatgatgaatatatgcaaaacttaagaataatgcaatggagagtaaataatagtgaaaaagttcgtaatattactaatgataaaagattaaaggcatattattcaactaatattggtagaataaaggaagatatttattcactacatcataaggcacagagaagtgaaattgatattaaaattgaaattgcaaaatcacagtttcgtattgatttccatgatacatcagttcaaaatgctgtttatgcactgagagaagtattagagtattggtggaatgttgaaatggaaactagaaatatccataatacgagatttgaatttactaagatagtgcatgttgaaccattcaagattattacaggtagaggtttacatagtggaggtggtattgccaagattaaaaatgccactattaaatttcttacagagaataaatacaagtatgaagataaaacagctgcaattcttgttgttggtaagggtaagtaaaagtaagaataacagtatttatatctagataagaattatttttaattttttaggagtttctattatattttgtttatcattaaactaaatttatgtacatggatgtatatatacacagcggagatctatgaggatttaattgaaaggacaaattacctatttcttcttctttgatttttgtgcaatattaccacctaatttaacttcttcataattagatgttaataagtctaagaaatcatcttcttcagtatcaaccttcttagttgggataccagtcttgagtctttcaagtctttcagcttctgccttcttagtttcttgttcaacttcatcagcagatttaccagattgttcaaaggcagagaacttagtcttgaatttattcatcttacccttagattctgcatctaataaacttgcatcaggtttggaagcattccaaattggattatttctttgatcagtaatcattcttaattcatcctttggatattgagatcttcttgtaataactgaaccatcacttagttcaacttgggtattgaatttatagtaaattgctggtctagccttaccaactctgattttctttaatggtctctttggaagggctgcttgaatctgcacacgtccagcataacctcttatctgcacaaagttgaacattgtattgtctaatatactaaattccaaagacttatatcttcttcctctacacttgcaagtttgatgtagtgaaaaataatgaaatttgggaaatattggaaaatctttaaagttccgggtaaatgctgcgccgtagaggtttttcaatttgcactattactgctgcgccagtgttgaaggaccacgataattgatgtttaaggggaaggtttggatagatagagttatcagattggataagtgcttctttttactggaaacagctgaaattgtgccaatgggatcaattctgtcgtatttgattgcttatattattggtggtgtaacatttgttcccttagtggtatattttatatggagattatcaccaattgtacctgatgatgtaaatgaaagaatacaccttgataatgttgcaaataaggaaataagtaagaaaaagggtgaacccgctggttatagggatttaagagctgggcaaatcattgataatagtgatttaggacttaaaacttttacttccggttggttaactgttacaaaggaattttataagttcccacagataaatccggatgattttaaatcaagtacttcaaatagtgatgtttctagtagtggtgctggaaatgacacaacgtctgaatcaaacacaaatagtacaaatgattataccggagattccgttagtcataataatacctctggtaacatattctcaaaattcataaaaggttctaatgcaaataatgctaatacatcagaaggtgaactcaaggactcagatgctgaatcagatgttggtgctactaaattgaaacaattaagacgtaaatacagattttatggtgtcatcaaacatgggaatttgttcctttacactgatgaaactcaaaaaaatgttaaacatgcaattgttttagatcactacatggttgcattatggcctagaaatttaactgatggtcaacttttcactaaaagaagtgctatttgtttactgaaaaaggatgcgtttattgaatctgaagagaaaatgaatgatttgcttaattttttacgaaatgaaaaaagctcaatcaaggaactacctaaaagttcttattttttatatggtgatacatcccttgaaaaggaaaattggtattatttcactattacgagcaacatcgttaccatccgataacccccattgttaataagatcaatcctttgataaatgcaaaaccattatattatcatacagcaaacatgcttgatttgattgagactttgaacttcaactgagaatcaattaacaacacaatggatcaacgcgttacttggtagattattcttggctacatatcaaacagatgaatttaaagacagcagtttagaaactagaattgaagataaattgaggaaaattagaacacctggatttcttgatcaattacagattcatcgtattgatgttggtaattctgccccatttttaaccaacccaaaacttaagtcactatctccaaatggtgatttagaaattactgttaatatgttatacaaagggaaggctatggttgaaattgcaacaaaattatttattaatatcggtgtagggttcaaacagcgtcaatttgatattgtcatgaaagttattttgaataaaattgaaggtgaattattaatcaaacttaagcctcagccttcaagtcgtatttggtacacatataccaaaatgccagatattgatttaaccatcgaaccagttttcagttcaagaaatattagttatggtattgttacaagtctgttggagagtagattcaaagatgcgattaaaacatcattagtttatccattctttgacgattttgttttctataaatctccaagtgaacttttccgtggtggtattttcgataaatcagtaagaaaaactactactgaaaatccgattttcaattccgaagctgaaataaagacgaaggagaataaagaggcccctgagaacgaaatcacggttaatctgaaagacaatacttctttaaatcaagaaattataaaagattcgaatgaatctgtattctccaaagcatcaactgccattagtgttgaaagggaaggagaacatactctatcaagattgaatacaatcaagagcgataattctggatctattgagataaaaacttcaacagacactgtttcagaacaacagactaacgcagacataaagcatacggtgatgaaatcatatagtaaattgaaaacatggtataaaaagaatcctcaaagtaatttatcaacaccaattaataccacatttgaatcatcatctttgaaaagaggtgagtctaatggaagtacatctaacaaagagctaccatatactccacctgaaatgatatctaatagaaggagaaaaacatcaagagctgaatcctaatgctttaccagaagcaaaaccagaattggatatacctgcagctgcattatttcaaacatcaaattctgcttcaacgccatctaactcttctttccaactagtctcatctaatataaagaccagaccatctgctgaagcacttgctagttttgaaagaaaacgtggaggctcaaaatcttcaaggtttagttccatttcgtcactagatgataaaccaccacttttccagcataatatacctaattctccctcatctcctgatcaattcattaatgaaaaattcaaaagtcaatcaacatctaatcctggttctggattatttgataatcatcaaaatcttaacaataatatcattgcaccaaagattttcagatttgactcacatgatcatatttttaatgataaagttgcagatacacctaaattacaagatgcaccagttttatctcataatatcaatgatttacaaaaagataataacttagataatgtaattgattatcaaaagacaagactcaaccgtaagccgccaccattgcctcttccaaaagatgatgttgatgaagatataaatacgtttgatggttagttaatctttttgtagtaaaaatttttataatctaaataaagtttttatggttttatataagttataaaaagttttattttaatctaagtttgatttttggaccttttttctcctttgattctgatgaatctgctgaattaccaggagatggtgaattggttcttgatctagatctaccaaaatgagaagatgttggtgaaactgatgatgatgatgattttttaatggcattcagacttccaacaatgcttttagtttcctcaccccaattgatagcttttggaataggtttttttggttcaggttcagaatcaggtttgtcagctggggttgttgatttagataacggtgtttgttttgattctttcggtgactctttagttgtctccttaatgggtgcaacttcttttgttttattttcaggagttacagttttgctaacaactttggtaacaactacttcatcagttttttcactagctttttcatcacctttatcatctggaactttttcatttacactactatcattagccgcatcttctttttccttatttacaggttctgattgagttggtggtgttggtatcatcattggcattgtttcaaatgactcgagttcttcctcttgttttataacagttttagtgacaattgtagatgtcgcaatatcagttgtattttcagttttgatagggaaatattgttcaggtaaatttagccaattttgttggtgctattttaagagtaacaaaacgtgatttagaggagtaggttttctcaaatctgtcatttgttgaaacaaaaacattctttgtattaaaattaaatttaacgtaacgtaaaggtgatgaaacatcgtgtcttatgatattatcatgtttaatgttagatatcggtaattttatcttaacttcaaatttggatgcagtctttttgatactaacattgtcattaacaacagcttgctttgttattggaacggatttgatggaaaaatcagttccagcatgtgatgccttttgttggttagacttcggatctgttgttagcaatttcttagtagcagttttagtcttaaacagtggtaattgaattttaaatctagcttcccttttaagtgaaacaactagcgatgatttcaatggatcatcgtcatcaatgtgtttatccttcaatttacaaacaatcttcttatcattgtataatcttgttgttacgataaatgagttttcaggtttgtataaaatcatcattatatccaaaatatttctccttgtatttattggaattagacaagagtttaatgaatcccatagttcaacctgtaaaccttcaccaaatccataagttttcctcaaaagctcgattgaacctttcatcgattttcttgcaagttcatctactcttgaacgcattgttgctttagcagcactgatatcatcaatttgaattgcacctcctcttttgtttttaacttccgtcttcatcttcaatatcttcctaaaaattcttcatcatccataattgatccaattcccacatcagcagcaacaccaattgatttcacgagtattttgattagttcatacttaataatatgtgattcatccagcttcaaagtagtaaaaaaataattcaaaatatgtttgtttttcaatcctcctaaaattaataatccttcaaatgcaactaatctaatattcacttcattgttaggtgttgtatacttaagtaaatctaaaaatgacatagtagctaacccctcttggacaaacctaattttttgttgtaaaattacttttgtaacaggtacgctggtatgatggtgaccactcatccattttcacacaacgattcaattctttaatggcttctaaaacaaatattgcattactatccatatttctattaagattcgtattttctttatcatgggatgcttctaaatcatgtatgattttattagatacaacaatcaaatcacataatgcaacaatgaatgaacagtagaaatcggtatcatcaaatttatttgagctattatccagatacttgaagatatgcaacatgattcgtttcaattcaataggagtatctccatttttgtttctcacactagctaatgatacaagtatagctcttgaaacaaataaatttgagaaatcagtaaaatcgtttggtaatggaaggtattcattaggatcaagttcgttataaccggcgactattttatgatcataacaaaacatatacttaaaagatttcaataagaaacgcattcctatatgatcattctcttcacttgacatatgtgctaatgcctttgcagcttcaactcttattccaaaaaaatacttcttatcgatcaaagttctcaacataactttggcgtgataaagagtaggtttgtttacctgctgcaaaatgacggatactttgaatttgagcttcaatatctttatctcttttcaattgtgattcaaatgtttcatctgttaaattgatagtatatttacagatccattcattatctgaatcaaatcttaaccattcaaatgcttgatctttttcctcatcagcagtttccccttctttattttcattttcattatttgatgtgtgttacttcttccttcaactcccaatttttgatctcctctgaagtcattagtacattacccattataaatggtttctcttcaactttttctttcttcttatttttttctttttctttttcatcagcctcttcttcaacttcatcgggtttatcttttctctttcttctatatttggtattatactgtatatctaattttgttaagacatccgaaattgacataatatgttcatatggtgcaccatgagcttcatgaattctaactgtaacaggaccaacaaatgctgcctgtggtttaaattgatcatcttctattataaaacaatttgcttgctccacaaaatcttcatgttgataatttttaagaaatatagtattagtagaatagtaatcatcggcttcacctttcaatgaagatgtttgcatttgacgaattgacatttcaatgaataatctcttcttgttaaatttttgcatgattctaaaatttggtactccggcattaaaaacccaattttgaaaaaatatctcaagtttatgatgagcaactttttcacaaactctttgaaaatgtaaagttgataaattattaccatttattaaatcgtttgacattgcttgaaggaatattttaggtatcactcttgaaagaccgaaaagtttatctgttttcgtaattcgtttgtctaaaataattaagattaatggtgcttttagccttataaaattcaaatcttgatcagaatttatagggaatctaaataattgattagccagaggacgtttatttatatctaattcacacaatagttggcatctttcttgaaccaaaaatttataataattcattccaaacattttccttaaaaattgtaaacccatgtatgatgaaataccaatagtacaccatatgtcgttcaaagtcttaggtaagacattaacaccggaatattgttctgccaatgctattgataatttctctgttgtgctgaacattggttcaattcgttttggcccgtatagaagattggaactggctatagtcataccagcaaaggaacatgtactagaaggtaatgtatcaataaacaacaatgtataacttgtgaatggaaatgaactaaactctttggaataaaattcaagagctttgtataaaaaaagggtagtatttattacttcttcctttcttcctggatggtaatatatcaaagttggaactttattggtatttgcggtatcaataccaaattgtgcactattctcattatcatgattttcttgaatattttgatcgttgattgaaagttcatctgatccggatttcaaatcaatcattggcattttttcaaaataaccaacggcaaatcctaaatgatgtgcacacacaggattataaaattggaaattaacatattttttagcaacatcgagaggatgtggggattctctcgaactgacaaaatctgggacaacaacgactgtatcaactgcttcttcagtttcttcttcattttcatcatcttgttgcatatttccatcaacatctagccttttatcctggtcattaattacattattttgattagatagtttctgtaatgcacgttctgcttcctttgtaccaatcattaaagattttccaatatctgctaatgttttaggaacaactatattaatatcccaagcaggtttttcatagaagttatcaatacaagggacccatgaactggtggaacaaccaaaatcatcattcaaagtataacaataccattcatttcttggtatatttgtggatttcccaccatgaaattgtattccatttttggagtttttgaccttgtatataatcttaatattaagtggagtataaactttatctgagttgttcatcgtatttggagtaccatttaaggaacgactagttcctgctggagaaaatgacagttttgaagagttttgtagtcttagttttatactttctggtatatcaattgtaagttccgatgtacaaacactaaatgatgagtttgggtcatcggggttgttttgatctgagaacagggggtaaaatttagttctaagcatattatgttgatgaattgagatattttcagaatttgagtcaaagaatggatcatattgataatctgaaagaacgggattaaatccatcattcatgtattcttgattttgaaggaaatcatcataagaataatttgcacgtctttgattaacaataattgatttaatttgaattccacgacaatccaacttaacttgttttaaataagaatcttgaggtaagatagtaatttctgtttcaccctgtatcgaattattttccaaatctatatccaaagtcactttctggtatccaactttaaatctctgtgatggtatgttgtctatttcatgtttattatgatgttttttagatattttaggagttcttggagtaattggagtcctaggagtaggcttcaaagatgaagatatcatcattttggtgctcatcccactaataactgtgaaaacctttgtttttcaatgaacttaccaactcaaagtaaatattcaagttgttgataaatgtatatcaaaagttgtgaaattcatgttgccaccaacgaagtgtaaaattcctcgcaaaatcagcaaaaccaaaagctaaaaataaagtgaaaattccgatacaattgtttacgtcatcaccttagtggagaaggaaaatttatggtttgtgttgtccttacagagtcagaattaatacacgctccgtccaaattgttaggtgtaaggctacttggggaaggatataatacatcttaacggaatttcatttatttttgtttcatctatctggaattgtaccatttaaagtagtatctcagtaattagggtttatatagacagtggtaggtgattatagagttactacaaagaataaatacataataaaactatgacatctgatgtatcaattgaaaatcagataagtctggatgaacaaaatacgtcacaaacaaatgaactattagattcagaaaaatctttacacagtgaaactaatgataatgatgaaactttaagagcttccaatttgaatcatatcatatcaagtaattcagatagtacttctgtaccaccatcgagctcagatatagaaaatcattttgaaaaattaagtatacatgttaataaagctcaaacagttaatatgggtgacaatatttctaaattgactgatgacttaaaacataatgttagtgataccagtttggatctttatagtaagatcaattccaaagattttgaaatattccactgtatttcattacttgaacataacacaaatgttgggatacaatattacatttgtaaaagaatacaaaaattcctattggagaactaagattttttgcaccacaatttttacaactgctaattacaatggaatcccaatcaatggcattagaggaaacaattaaagaaatttgtttctctgatcctcatttcagtttaattacattttggcatttacaagcaatgttacaagatttatcaaaagagcctgaaagtgtaggatttcaaacttgtaaaagattaggttaatgaattacaatttcaattatttaattattcaaataattctaaaacatctaattcgagttttgcttcttcttcaggtgttatacctagacatgatatcaataaaaatttcaaaccaaatatttatccaagtattacattagcaacttcaattttagcgggtataactgttcccgagtcaacatcatatgttgaaccaattgttaaaatggaaggtaaaagagttaaaacaatggtttttgaagttgttaaagatataaagaaaagtcttactgaaaatttaactaaaaagaatacaattaataatgcactaatgggtaaaccaagaatttatgatcaaccagatttaagaagaactaaatcgatcaatgcaaatatgaaagatagaaaatcattacaattacagaaacaaagaattaactcagaatcacctaaaatgagaaagtcagaggaattaggatttgaaatgattgattcatatgctgatatgaatttacctaatttaggtaaacctgttttaaagggtaaaacttcaagaaaatcatcattatatcacgttcattcatcagcttctattaatacaacacctgaagaaaatattgaaaaatcatctaatgatagtaaaccatcattagagcaacaacatttaattagatcaatgcccgatttacatgatgatgaaaacaaggatgatgttttatctgattctaatacaaatatatcattatctgcgtctccaaattcatcatttactgatgtaatgaataattatcattcagatactggatcttatgcatcatcaattagaaattcatcagattatagagatagtatggaatcgttaccaacgggcaataataattttacaaataataataataatattaataacattaataaatcacatcaatatgtttcactaaatgaaactcaaaaggctaaactgctaaaatctagttatttcaaaaatgagacacaatttgtcattgctttacaaaatatatccattcggttatccaaagttcctaaagaagctagattatctacattaaaagcagaattgtccattttaaataaagatctgccatgtgaaatcgatataccaatgttactacctaaaaataagaaaggtaaactacataaaatttgtagaattgcaattaatgaaagtgcggttttaaattcagctgaaagagttccttatttactgttggttgaatatttatctgatgaggttgattttaatccagctacatcagcaaataagaagattttaagaagtatagaagatattgaggaatctggtgttgataagtataaatttgatttatcatataaatcttcaaagagaaatgtatcaagcggttcaacgcttgacagtaagaatgattatcaaagtgatattgaagaaggtgatattgcagatatttcagttattaaaatgaagaataaattaagtaataaaaaaataagtcaaaatattgatttaaatactattttaaatgatgaaaaaactaataaaaacttacctataccaccactaaatgctcaaactgatcatgaacataatattgcaactcaattaagaatcgcgtcaataatgttaactcaattagattcaccaaattcacttttaccacaaacacaagcatcacagattagaaatagaattattgattcaatgcaaacaatgcaagctagatttgcggtaaatgatgatacagaagttgcaggtgaaagaaaattagcaaatgatatgaaagttgcaggtttgagttatcttggagaagattggaatactaaaaagaatagaattcgtaaagatagtaaatttggacatttggagaattgggatgtattttcaatgattgctaaaactggtgacgatttagctcaagaagcagtttgcatgtcaattaattcacttaatggctaatatttggtatcaggataaagttaaagtttgggtaaagagaatgaaaattttagttacattcaatcaatactggtttagttgaaactattacaaatgcaggtatctgttcattcaatcaaaaaggcactggaaaaggatatgcttgatcgtaatgaaattccaataaatggtgttatttcattaaaagatcatttccatagattatttggtgatgaaaatagtactaaatataaattagctcaagaaaattttgcagtttcattagctgcttattcagtcatttgttacattttacaaatcaaggatagacataatggtaatataatgtttgattctgaaggtcatatagttcatattgattttggatttttattatctaattcaccaggttctgttggatttgagagtgcaccatttaaattaactcaagaatatgttgatttattaggtggtgtaaattcatattattttatgaaatttaaatcattaactaaggatgcatttaaatcattaagaagaaattcccaatgtataattgatatggttgaattaatgcaaaaagattcatcattaccttgttttaaagcaggtgaaaatacatctgttttattaaagcaaagatttcaattacatttaaatgatgaagaaattgatttatttattgaaaatgttttaatcaataaatctctgaatagtgcatacactagattgtatgatcaatttcaattattaacccaaggtatctatatctaatctgtataacaataaattaattaatgaaactatattatataattcatcagcaaggcttccctatagatcaatgatggaatgcatagactgataaaggaacctatgaaatgatgtaacattacgtaatatgatagagggggccattttgttacgaaggttctctgctcaaaatcagtttcaaccaaaatataggttcaaaaatggtatgttaaatctattaatattagttattataaaagttttttatacggtggtaaaatcacagtaaactaaacttgaatcctttaccatttaaagttataaattcttgaaatacctgttgatattttaactttacaattatctgtatcattgaaataaccgttgctatcagttatacttttctttaattttaaactgtaatcatcatttgaaataatatcaccatcagttgtattattgaattgtaattggttattttcaatactactctcatgtgaaatagttgatgtattaggtagtttagaaaattgtaaaaattcattagattgtggacttggtgtagaaaatggagttttaggagaatttccaaaatctttagagattaaagtgtataagaagcattcaattgaccattcataccaaacactttgattcaaacacactctgcgtataaaaatactgatttcttgatcttcaagtaaattcagtggtgtctctaatggtaaatactgcaggtagccaagaaacacaatccatcacacctggctgttttggtaagttatcaacttcaatatcagcgtataaaactgagctgaagaatcctgctaaaccatgaattaaacctttacgttgaggactaatagcaacacgtgattgtcttgaattcgtgtttattacttgataaatgataaatttgatttgaagattttcccctgttgattactttactagtaaatgaccaaattagttctggttcatctgttaaatattccatttctggtatcattggaacgtataatttatcaaccgacattttagatgctaatttccataaatgtggtgaatacactggtgaaatgtaagaattaagcttttgtggaatgaaaatacaattttcatgacataagtcagaggatgatacactatcaataaattcaggcattaattcattacaaccaaaacttcctattaattcagatatgatcatatcaaaaggttgatgatagttatttattaagtcttcatgattttgataatttctagcgtccatattaaaaatattgacattattgttccataattgtgaattcttttgatttaagtaaataatcacattagaatttttttcaattgcagttattttaaagttagatggtgataacgataggaattctaaagctgagaagaatctatcaatgagagggcctctacctggacctaagaataatatatgaatttttctattgttctgtgaagttttcaatttagacaggtcaataagtgccttaataatagctctttcgtattgttcgtatttgaaagtatcttgttcaaaaactttataagtataattttccaaatcatttaccaaaggttccaatggagattgtaatataagtgaaggattagaagacaaagttatctttgattctttcaaagcattcaaagtaaatgaatacatataaggtaataaagtttccttatgggagatatttatcaaatgttgtaagtaagataaataggtggatttatttaatttattatcatattcaattaaactagttgatgtatggttgctgtgaggactattggatttatcaattccatgtaatataaaaataggagtatctaaagttttatattttaatagtttccaaataattaattgattaaatttgtgtaaaactggataattttttgcatttttaataaattttgatgaagatataagataaaatttgattggttctaataaccatctatctaaaattgcagcgggtatattagtatttgatgcacctaaagcaacagaaagattaggattataatcacatatagatcgaattgaattccaagtttcccaagttgagtaaatattgaatagatcaattgaatcattattaaaatccaaagatatgggtaaagaaatcgaaatatgaattgaagggaaaattgacaaaatatttgaaacatttgaagaaaatatttgaatattatttatattcttgggtggtgttaaaataaaagtttttatacctaaataatttgcataagatatttcattgtatagtacttgaaatgaaaattcattaataattgaattataactatcaagttcaatccatgaagaaattaaaccaattgtatgttgaatgtgattaccattaaatagagcagtatcttgtaattctgggaaaggtacagttaaagtatctaaaatatattcagattgagattgaagttgaagttctgatgatgtacattgttggaaataatctttacacttttgtctataaatatgattagttataggtaaaataaagcaattataaccgatattgaaaagatgagatagtaattggctatcggattgtagggactgtgctatgtgggattgtggttttagacctaaagtagccattatttagatattccacggatgataaataaagagttattgagtgatgtgtagacggtttgtaggatatagttgggatcaaaacaatatagaagatgaaaaagattggtaaacttagtttttcatagaatattatgaaataagtacaaaattaaattaaattaaattaaatagaatagaatagaatgaaagttaaaaatcaaactaaatcatttgacaaagtaaagctaataatagtaaataataataataataataataagaaataaataaagttataaaacacttcccctgattcaatgtaatgccattgctttaattttcgtgacagatcacattacaataataaacgatatagtttactaaggaaccagcttttttttccatttcccatcacgaaaacgcgagaaaatttcattttttttctcccactttcagcgcttccactgccccatttctcgctgagtcgtccttactcaccaaatttcttcaacaactcagtttcacattttttaaagggtttatgtattatataaacacaacttggttaccatgcaacaacaacaacagcaacaacaaccacctcaatctcaattccaacaacaacaacaacatgtatcttctcagaatacaagaccaaaacctttaacctctcaagagagagaacgtattttcgcttatagagataaatactattattctccaagatactctgatgatgaatatgaatatagacatgtagctctgcccagagatatgcttaaaattataccttctagtttctttgctgagaatggtacttttaaaatactacatgaagatgaatggagatctcaattaggtataacacaatctttaggttgggtacattatggttgtcatgctcctgaacctcatatccttcttttccgtaaacctaaatgatttaaatttctctaattaatgtccaatttacaattacatttataattaattgattaatataaatactttatatactttatatactttatatctccattcatttccacttttacacattaaaccaaactaacctaccgactattctttaattcgtctaatggtagttgtaatattaagggagacagtcaaatctctccataacatcaccatttttcaatttaccttcctattcgggaagttttttgtttccttcgagggcaattgaatttttcaaattttgatacaatagaaatagtttcatttccattatcaattatacactggctcatccttttcttttttgttactaaatccattcatttatatcaatcacacttaaactaacaaggtatcccgataatggaagaggaagatactcttcttaaattatcccagatattggatactcttgtatcacaaaattcacctggtaaagaacgtgattcaaattcaattaacgcgttattaacctcagttttgacttcttatcagaacagatatttagaacccccttcaacgaaacctaatcaaattacggaatcattaattgtcactaaaattttttatgctttacaaaagatgtttgcaagaaatccttctttattaattgaaaataatcgatatctaacaatacttaaatcaacattttcattctttgattgttttaattgttcattggaaattattgataaaataatattctcattgattaaaatttgtgcttattcatttaatagtggactgctcgtacataatcgtatattatctcaacaacgaaattatattttaaaatatttagataatattttatctgatataataaagtcatttacaaatacaaattcaaaagaaacagaaataaaacagttagtccccgatgctaataatccaaatactctattgatggatgattttagtaattacaatcgttccaaaatttctaaaatttcaatatcaattcaaaatactacaatttataactcatccttcaatactgaaattacttttttcacaagacaatatatcatacacaattgattcatatataaccaaatgctggttttgtttagagaatatcgtaattaatatcaaattcacacctgaaaatacacaagttattgatatattagatcatctatattcatcgttattacaaacaactacaatatatttcttaaacgatgatacgaaccaaattgctcgtctagaattggcagtaaacacataccataaaattatcaactggtcattgttgaatcatttcactgcaattccattggtgttggcacattctttaataagtatatcacttaaattagaaactttagggaatacagaatatttatggaataatatagggatatctgatgcttcattatatcatttcttacatttaatagatagaattgaagatcatgatttaaaaaattgtttgaaattattggtatatgctaaatttatgaaaaataataatgaagttgaaagttctaaaacagaattagaaactcaagataattgtcatttattaataaaaacatgtcccttcaaatatgaggatataactttgtttaaagactatagaactgcaattcaaacatttaagatttaattacatttttttcaatgaaaaggaaaaaataattgaaagaactgaaaaactatccttggaaactataaagttatatgaagaaaataatattttatctacttataatatcaacgctttatcgtgtttggaacttcacaacttgatagaatcacttggtgtatatgcctgttatttatcagggttctttcaatgtatcatcccaatgctgtaaaatatgtgatgtttgctatccaatttcttcctattctgctaaaaatgttgataagaatagacccgacactgattcaaacaaaaaagttattgaaattatagaagtattaaaacaactaatggttttatgggatggaaaatcgtgatacacatgtaactatcaatgtgataatggctttgattagagtttatagaaatttccagcctagtaatgataatacaggcattgcagatcctataatttggaaattcatacaatattcatttgaacataattacagagaggtgagaatgttgattgttaggctcatccctttattcattataagatatgatgataaaattttgaatgataatttagataaaatcctttgttacatatggagcttccaaccaaataaagagaatttacacgtttttgaaggttgtattgttttattgggggaattattgatggtaaaatcggttgatactcgttattatatattgttgaatcacttaataaaattcatgtcagatcctgatgaatttagatccaatttagctatatttgaattgaaaataattgcagccactaaaggtgttacaccatggaaaattgtggaaccatttataccttaattagtagagaaattgttaagaatagaagttcaagtcctggtattttaacaaatttttgctttgctattgagatgagtcaagttcttttccttgagagaactcttaaatttacagttccattcttagttgattcatataatgaaaatcatattgcatttatagcatctgttaccaagaaaagtaatgctgatttaataaagttccatttagatgaaattttagcgtatctttttgctaaatatgataatatatcaccacaaaagataaccaaaattttatcaatttatgataaatcttatgccaactttggtttagacgatttaatacatttttgtaagggtccattttttctttacaacctattatatcattataattctgaatcaagtacattagaaaggattagatcttccattggactgataagtaaaactatcaagtttgatgaaaatgaagatatagcaattgaaaaaatgttagatagatggtttttaattataattcaaatgatttcaactacactcaatgataaaaagggtagtaatccattcactgttaaagttagagctattaaatcaattggctgtttagcattattgtataaaaaatatgaagcatatctgggtcaagttgtatctgcattacagttagctttgaattatgaagaattgagaactgaagcactcatctgtttgaaaatggttattgaaaatgttgattctaaaaatatggaatatatttttgatactttattatcacaatcaattcaactttttgatgaattcacagaggaaaatcaaaaactttctactgaaattatattaatactgatgaaacgggttcctaataaagatttgagttacagatatgcattacaaaaaattccaagtttcaagaatattagcttccaacatgtttctgatcgaagactggttgctgatttcagaaataggatgagaagtgataataaatggattattgaacaagtattggatgatttgatagagtatcttactatgagcaaggtaaaatatcaacaacttatcaaagatgatgaactgttgttaatgacatcaaaaagtctatttgacatgttgttaactaattctttcaaattttataattcacataataacgatggtagtgctaaagatgacaattctcagatttcaatcaaatcagctaaggtttttgctttgatgggtaatctggaaccaaataattcttcaaatgggagacaaacaagtaaaggttatgataatgtaacgaatttcttattagtgacaaatttgcaaaaatccaaatctagtgatcaagaaactaaccaaacacttgttgaattttccatgtttttcttgaaaaatgtcttggttcgttcatttttatcatcggtcaatcctgaggaacaaaagtatctttctttcataatacaagagtatctttctatttttgatataccagcattttcatgggatagacttgatgatttgactaaaaatattttaacccctttaaaatattcaagatataaacaaagtgtcaaacctaaaaaatacagcttcccaatctataagcctaccaaagattataatacttggatcaaagaattggcaacaaacactctttacaattgtgctgcaatatcagagaatattttcaaatcaccacctcaaattacttctatatgtaccattatcccactccttgatttcaacattataagatttgttattccttatgcagttttatttttaattgtcacagaaccagagaatagtaacgataaaaaacagttatacgaagagttcaaaatagttttggagcatgatttacattcagtgaataatagtgttgttaaggaaggtctgaaaaaatgtattgtgacaattttggaaatttttcaattcttaaaagcatggaatagtaaaatatatgaagaagaagatattggtaggtctaacaataaggcacatactaaattgaaaagaactggtattctaagagttgaaaaatttatcaatttgttccctgctgatgttttagccaagagatgtgcagaatgtgatatgtatgaaggctcgatcttgtttttagagaaaagttacaatgaggataaaatggaaaaagatgattttttcacaagcttgaaagatatgtatgttcaattggaagattatgatcaacttcatggtgttttaaagactttttcaacaaacagtttgaatgataaactattggaattcaaatataacgaagatgctcaagtctctaatgaatctttaaatgcaattgctcagtatgatctagatgatattgccgatgattttaatgaaaaaaatgatgaacgtatcagtgttataaaccattcagctactgaactttttgaagttttaaataaaaactgtgaatatgatcaaatattacttaatttgaaaaatttcaaacagaaaacagtttccaatgtgtcaacaatgaactctgaatggcttttgcatggattacaagctgccatatacaccggactgattgatgatattgaagaatggtcatatttaagtcaaaagtcaccattactttcgatacctggttcagatctttctatttattatgaaattgcacaagctttaatatcattgaaacataagaaaatttcaaattgtatgaatcatatcaaatcagcgactacatacattggtttagctatctccaattcagagaacattatccataggaaaattccagattatatggtattattacactcattaaatgattttgaaatacttgcaaatactaatacaattaacgataataatattcaacatatcaagagaagattacaaaattcaaaaaaagattttagatcaatatggaaaattcattcaataaaatcgaccatctatagactacatccactgaaagaatttcaagatttatataaagattcattaattgaaagttgtaggattttaagagaacatcggaaattacctcaagctacaaagtatattaccaaggcattggttttgaatgataaaagtttggataaagaaatgacccaatcttcaactcttttaatgaatgttgaattttccaagttattttgggcacaaaataattatgaaacagctttaaaaaatatgggtctggttgttgaaaaccttgatgtgaaaaatccatattatcttgaatttaatttaacgtatctgaactggttaagtgtttcagctgaaggtagtagtgatgagataatgaaaaaatatagcaccttgttaaatgttagaaattttgagtattcagcagacgtattttatcaatatgccacatatttgaataaattattggaggctcaagttccggaagaatctgatggttcaattgatatcatggtgattaaaaactatattttagccgttagatattcagaaaaatatgtacatgaagttttaccgaaagctgtcactctgtggttggattatcatcaaaaatatattgctttggaatcagatgttactaatgtaagtaagaaaattgttgatttaagaaacaatcattatttaaaactaaatcttcttgttgaaaaatgtgtttctgagttgggtaataagtggtacattgttttatcgcaaatgatatctagattgacgcatgatgataaaaaaattacagagattatatcaaaaattattattgaattaactatgaaatatccatggattttattatattctgttttttcacaggcaagatcagttaataactcaagaagagccattggtagtaaaatattaactaaattacaggattctagaagttctaaagatgctaagttaccgaagattattgcttcgggtttgactctgttggaatcaataatgtctgtctgtaatgttaataataattttaagcattcaaaatctggaaatttggttaaagacttatacaaggatcttaattttgactaccctagagatgctgaatgctactcattagctttgcctattaaaagtaatatggatttattgtacaacctaagaaatgatattgataaaagagtggtcttttatcatagatttcatgaaaaggttaagattctattttcactacagcaacctaaaagagttaaagtcactggaactaataatatgatctactatctattatttaaacctaaggatgatttacgtaaggataataaagttatggaattctccactgttatggatggattgttgggtaagaattatgaaactaaaagtagaaacatgcatattaaaagttttgcagccactccattgaatgaaactactggtataattgaatgggttcaaaatttcattacattaagaccaattattgataaacaattaaaaaggaagaataaaacactgaatatgagaaatatgaaagcagaattcggtgatgctaaaaatgatgataagttaaatatttacaactcatatattgaaaaatatcctccggttttgggtgaatggatgattgagagtttcccgaatatgtctgaatggtttaaggctagatcattattcactacttcattagctgttatgtcaatagttggatatcttattggtattggtgatagacatttagataatattatgattaataaaaatacgggtatgattatgcatattgattttgattgtatctttgaaaagggtaaaagtttaggagttccagaaattgttccatttagattaacacctaatttagttgaagcaatgggagttttaggatatgaaggatcatttaggaaatcatgtgaattaacaatgtcattaattagagaaaatgagaatattttaatgaatttccttgaaagttttattcatgatccattaatggattggcgtggatcatcttcatcatcatcaaatcaaaatgaaagtagaatggaggagagaaatcaattacgtataaagagaaatcaagaacgtgtttataaaatattaaggagaaagattcgtggtgttttaacaaaggatgatgataatacaagttatagagatagtggtggattaagtgttagtgttaatttacaagttgaattattaatacagacagcagttagtgctgaaaatctatcaaagatgttctttggttggatgccatttttataaaagttgttataattaatagttttttaagtgttttaaacaaagttttaaaaatacaatgtacatttcaataaatatgtgtaaattaagtaattagtaaattaatcactgaattcttcttcagacatattatcactatctgcaatatcttcatcttcatcatcttcatcttcactcatacttgcatcatcatcatcatcatcattttcttcactataatcttcttcatcttgaggatcttcatcacttggatcaaaatcactctcagcagattcttcctcttcttcatcttcatcatcttctccaccaccaaggaatgaccaaccaccatcttggaaaaatccatatggatcactttgaatagttttcatgattgttggccaatttaagttaactggaccttcactataaggaatatcaacatctgttaaccatgctttaacatcttctaaactttccattggaattgtactaacatgaacaacagggcgtgaaaaatctttaaatatgaaaactaaatcaaaattctttaaaccaaattgaacacgttctaaatgtgcaacttcaacttcttctaatgtaatgactaaaaatggtaaatcgattaattgaactaaacaatcacgtgtaggtaaacaaacaactgcactacgacttggaacaccttgaaatcctaattctctgaatggaatatctaaatcaactaaaccgttagacgaatctgaaattgcttctgagaatgcacggaattctttatctaacattgcacgacgacgtctttcttcttgttcttgttcaagttcatcttcatcgccataacgatatttacgttttctattaccagtttcatcaatggacatatcagttgcttctctatagaattgaacatcataggttttctttttaccaatcataattggtgtacgtaaatgtgcatgaataataactaataattcacctttacatgattggaaaaataaatgtttgatattactgaacaaaacatcaactctttgatctcttgttaatgattgataacgaataccattttgatgaattgaaacaaaacctggaacacgttttgtatcaggtgttggacgtatgaaaacattatctaatcttcttggtctattaacttcaattaatgaagcttgtgttataacatcagccctttcacgtttttcagattcacgtttaactgcagcttttttcatttctgaaattctctttaaaacttcagtcattctagcaccatcctttgaacggaatgttaaacttctaataaattgtttatcatcaccagtttcataaggtaattcttcacgttttgtaaccattaaaccaggagaattaaaatttaaacgtaagtgagtaaaatcaccttcctcagttttggaaccatttttatatgcattaatgtggaaaggaacaggacgacctaaaattggtaaaataattgtttgatttttagaatcaatatgaatttttaaatctttaacattaccaggaatttgagattctctaacataagattcatatcttctaaaaactgcacgttgttcattaccatctttagcatcttctggattataacgttccagaccttctttttgacgtttagcgtgtaattcttgttgaatctccttttgaatttgagcttgattatcttcattatttttttgttcagatctacgttttgcctttaaaactcttgtattaccataactttcagccttgacagatgaaggttctgattttacttttgaagatttagaattttcctttttaattggttcatctttaatacttatattttccttattatcaccatttctattattttgatcattatctttagcttcggattttaccttacttttatcatcatcaaaatagaatgcaatatcttttttcaattttggagattcagttaaaataattggttcagaacctgtaattctaattgtatcggacaacaataatgcataattacccttttcagaatcatttaaattgttaaaacctaaaactaagttgatgactgaattttcctttaaagttctatcatttttagcattaataacaccagatgaatctctaaaatctataccaattaaagaaccaatatttttaacaaaatgatctttcaaattggagtttgaattttcaataaattttaaagcttcattatagagagtattaaatttaataccatctttagtaaatttgaataaatgatcttgtaaagagattaaaaattcataatttttttccatttctttagaaggatcaattaagaaagttcttgaaacatttgaacaataattaaaatatcttaaaccaagagatgacataataacaggacctgataatttatcatttgaagattcgacagaaaatttcaattcatatttaccatttgattgaacaattggtttataacaccaatctaaattatttaaatcgaaatctttacctaattttttcattgatttatttgaatcaaaagatttgaagaatttaccatcatcaattttattttcaattttgtcaactaattttgaatttgtaatatttaaatcttcatcaataatctttgacatttcatcagtaaagaaattcatcatattaactgaagcttttgatgcaattcttaaatttttttgttcatcatcatctttaaattctaaagtttcagataatcctaaggaaacatcttttaatgataatttagattgatggaaattttcccaaagaggatcccattcattcataaatttaccttgaaatttatccttttgtaaaatacctattgaattattaccttcaataagtgaattttcaatatctttgaaaaaattttcaaattgaattttattatgatttggatctttatttcttgaataaattacaatattattattagttgaattaattaaaggttgaatatattttgcctttgaaacagatgtaacaaaataaatttttttacttgtaatatagatagcagttgcaggaaattcataacctaaaagccaattatgtaaaacagttgatttttgatatggatttgattcatcagatgaaccaacaactattaaaataccattaactttttggaaagattcattattaactagattcttttgtactagatgcaatcttcttctaaaggaagtgggatctatcctaatatcggacatagttcagcagctgtggaatggataaatgccctaacccaaaagaaaagacagtacctgttgtttgccatcagcaatattattcttgaagctgagcattaaatttcattaaaatttccagtaactttcctaaacgcgtaataattttaaaacggggcaattcttatggaattacgtaatcaataatatataattacgtaatgtataaataatttgtttcaggtgtacagattaatccaattttttgtattttcattgcttttactattaatattgcctaagcttaatagtatagtaagagagataatattaatattgacaacatgagaatttacatcgatgatctaaaggttgtttatttaatattttttatattttatactttatttttatacctatccttccttattacacaacttacctaactaattaactatgccaaaggctgacgaatacggttatgattatgaatttttattcaaagtagttcttattggtgattcatcagttggtaaatcaaatttattatcaagatttactaaaaatgaatttaatcctgattcaaaggcaacaattggtgttgaatttgcaactgcttccttagatattgatggtaaaaaagttaaagcacaaatttgggatactgcaggtcaagaacgttatagagcaataactgctgcttattatagaggtgcagctggtgctttagtagtttatgatattacaaattcagattcttatgaaaatgtttcaaaatggttaaaggaaatgaaagataattcggatgctaatatagtaatagctttagttggtaataaaagtgatttaggtcatttaagagctgtaccaactgaggaagctcaaaattttgcaactgaacataatttattatttactgaaacttctgcatttactgctgataatgttgatcatacttttaaacaattaatacagaatatttatgaaatggtttcaaagactaaattcgatattaatgatgaaaataataattctgcaaatgagattggtaaggtaaaacaattcaattaactcctgctccaaaggataaaaaagtttctaaaaattcaaattgttgttaggttatagaaaacttatatttttgttataaactttttattcattattattaccagttatatatctctttctctctccctacatcttttactttctattcttaattttttgctatatatatcttgtataccaaataataatataatacatattataatatacactatggtaatgctcgtgcactactatttttgttcttccttttccttaaaatcatcatcgtcatcttcatcatcgtcatcgttatcaccacctttattatcagccttctctgcatctaattcagcttgaatcttactgtaatcaacaactttacccctagttcttctaccttgtgtaataatattagttgtatcaatttcagctaaatcatcatcaacttcatcttcaataattaatttttcatcagtcgatttcatccttttcatcatctgaatcatctgaatcagtctttggttcttcaatttcatcatatttagaatgtctacttctcttcttcttctttttcttcttttctccttcttcaccattattttcattctttctcttttcaccaacttgaattatttgatgattcttcttcagcttttttcaattttttcagtttcttcaactttcttgtcaatttcacttgcaattgctttattgtccttttcttcactcattatatgccagtatataacctactaaatgtgaaaaaacaaaagaaaaaacaccactaataaactgtggaaaatttcatgctctctgtatttttttacctttacccgcattgacttaccagaatccctataataataaataatagaaaaaaaccttatgatccataatcaaggcatcgagatcgactttcaatcttctttacacaaccgcattgcttattataagaaacaaatataagggattctataaatatacatagaagaaaaagaatatgtttgatagtaaacaatttatttataataagaataaaccaaacaatgacttaatgtcatttcataaagataaattcaaggatccattactggaattactacaatcggatgacttaaataaaaataaagaattatctgattcacttattacatatattgatgatattagtgatgaaggtataaaactatggtgtattgaatcattaactttactaagagatttagaaaatttagagaataatttaagtaaatgggaatttctggcattggatcatacaattcaaattgaaattgaaaataatagaaaaggtattaataataatgctaggcaagctggaatatcattaaaggaagtaattgtattatccaatagatctaacatgaagaaagcaactgctgacgaagttttaaatcagtcagaaaaaatcaaatctttattattggataataaagttaaaattgatgaaagcattgagagagctaaaaaggtttctaaaaatgctagattactcataagtgatgcaggtacaattatggtcaaattaacaatgaggattgttaaattagccaaatatttagatcaacaagttaatattggttattcaaaagcaaaattaattaaaattggaattgatgttgaaaccatactaattgaaaataatgaactactagaagggttcaattttgatgggtatagagactatattaatgaaactttagatgatattttcaatgcagttactaaaaataatacaaaacttctttggaatgcattaagaaaatttaatacagctgaaaaaacctttgaaaaactacttcaaaaatcaaaatcaaaattaaagcataaacacaaacataagcataaacataagcataagcatggtcatagtgatgatgatagtcgtaaaattaagcataaacataagcataaacatatagagaaaagtgatgaaaagaattcaagttcggataaaatcagtgtatcatcacctacactatcagaggttaaatctaagaattcaagtgatgtagatagttccaagacattggtcaatgctggtgattatcaagataatgctgataagaatgtattgactaaaataagtgccagggaaacttttaaggatgatgattctttattaagatctaatattgggaattatatgcctgaactactggctaaatttaaaaaaggagatgatttaagtggaaaatcagaagatgaaagtaaagatgaaaaaatagagacacaagcttccaataatgaaaaggccaaatctgaaataattatagatgataaacatgtaaagccaccaagtttaataacaaacttgttgagttcattttatcaaccagtcgtttttcatacttcaaatatacccttaaatgaaaccaaaactattgaatataataatgaaattgatgatgatgatgatgatgtagaaaataataaggcaactgaaaagaattctattaaactgatagaaaatgatggtaattcggatgataataaattaactgaaaagaattccaataaactgatagaacttgttgaacttcaagctttagagaccaaagttaaattatctgaatcaacaatgcaactcaatgaaatggaaaataatctagagaaacaagaatcaacgtttaaaaagcctaccgtttcagaaatgccaagattagctaatttattgaatcatagaccaattgctggaacttctggtaaaatattgaatatacttaataataaatagatgaataaatgaatagatgaataaatgaatactagatgttacatagaatactgattttaatatattaatgatttttatatcgtatatagaagtttatgtacagaaatgaaaaaaaatggttacacaagaacatgatattcattttaatgatgatgtagggataattagaattgtgataaagcatttgcagctctactgtaagaactaccaggatttaaatcattagtatcatcaactctaacaagatttgatctgataactcttggatcatttttcaaagaacgtaaaatttctctctgtacagcacttgaagaatcaaaaagcattaagaaatgtgaaccttggaaatgtctttcaccagctttagtcataatttttggtaatggacgacaacctaatgaaacaatttctctcactacacctttattattaataactaatttcccaatagttgaagaaagtgccttagcttcagcatgtacaaaatttggattgttaactcttgcaatagcaactaattcgtataacatcttgcctgttcaatgaaatatcaatacaaaagcactctttacatcagattggaaattcatgttaaaattttaaaactttccttaggatcgctcttatagttaagtgtttcttactgtgttttgtatgggatatctcttcttttgctgtgttttatatgagtattatgggttatgatgtatctgtaatggtgtattggtggtatagtatggtgttttgagtactattgttagtgtataggatgttggtagtgttatttgccctaatttaagtgtaatatacgtattgtaagacatcgacgcagagacggggtggcgtcctgttcggtggctgattaaattggttttacaatctttaatctttacagtatattaacattatatctttctttattgtagttctttatttgatatagattatattgccattagaacaccgctcaagagatgtttcaatggatgtttgggaagaggttaacacctcaggaacaattaagaaaaaatcaaagacaattagaacgtacacagagagaattagatagagagaagggtaaattacaacaacaggaaaagaagattatttcagatattaagagatctgctaaagaaggtcaaacaaagacgatgaatattcaagcaagagatttaatacgtacaaggaaacaagttgaaaaattcgataaaatgaagatgcaaatgcaggcaatttcacttcgtttacaaacaattagaagttcaaatgaaatgactaattcaatggcaaatgccactagaatacttagtggattaaattcaggtaatttaaatattcaacaattaaataaaatttctcatgaatttcagaaaaatatggatatgatggatcaaaagcaagaaatgatggatgatataatggatgatatgatggatgatgaaattgatgaagatgatgaagaagaaattgatcaagttgttagtcaagtattagatgaaattggaattggtttaaatgataaattaggtggacttaaagttaactctggtattaataatgataataatgcaattcaagagaatgcatatcaaagaacagccattgccacagcatccggtggtggtgcaagtgatgaagatgatctacaagcaaggttaaacagtcttaaaaagtagacaatagtattatattatatataaattacgtaatggttaccatactaattttttttaaattttaatgttctgatttctctctatcactgacatcatggctttctcctctctttccagtttaattgatttgatgtatacacgttttcttctacttttatgaacagttattgttgatcatagtatctataaaacacacaggcaacacctataatcatactttaacacaatggtctttaaattcaataaggataaatcttctaaggataagtccgaagaatcacatcatagattctttcataaattaaaggaacatgtcactcattcaaattcttcacccaatgcatcgtcacctaattccaaatctaattctgctctgaattcaaaaactgcttcaagtacaaaactcaattcattagttaatcctcaaaggtcaaatactcctttaaatataaataatcataatcataatactagtactaatactaatgccgcatctacggtacctttatcaaaaaatgaaattaagaaaactttagatgatgcaaaggcaggtttaccatcaattgatgatgttcctaaaattcaaaagaaaatgacttataatccttatggacttaatgtaattccaaatgctggtagtggtaataataatggtaaatcaactttacgtacttttacaattgatggtgcaattgaggatgcaaacaatcaattaccaaaaccaatctcaaatccaaatgattatttacctgaaaatttccaaattcctgaccctttattaactgatggttatcaattaactccaaatgagaaaaatattggtgttggtgcatctgcttcaattaaaaaaattaataaaagaggtaatttaaaagatgtttacgctttgaaaaaattaattttatttaaaggtgaaaaaccagatgaattttattctagagctacaaaggaatttatcattcataaaaatatttcagatggtttccacattgttaattgtatctcattagttagaattcctcatataccttttcctcaagatatttcaagtggttggggtttagttttagaactttgtaaagcagatttattctcaattattgaaaaaaaatcttgggttacaacaaaatcttgtgaaaaactgtgtatttttaaacaaattgcatttggtttaaaatttttacatgatcatgatgttgttcatagagatttaaaacctgaaaatgttttacttgatatgcatggaattgttaaattaacagattttggtgtttcagattatggacatgaaattcctggtgattttttttcaccaattgcattaacaacacaattagttggttcaccaccttatcaaccacctgaagttcaatcattaaatgaaattgaaagaattaagagaacaccttataatccatttttaatggattattggtcattaggtataattttatttgttttattttatcaaaatgtaccattccgagaatctgataaaaaatgtcaagattttagagattatgatatgtcatatgataaattttgttcaagaaatccaaatttcagaaaagataaattagcaccaaatttaactggtacttcaccaactaaattaactccaaagggtacaccattattagattctaacggtacaggtactgttaataaatcaactgatttatcatcaatttcaagaatcccaacaattcaaaatttttcggtacgttcatctgctgcagttgcacgtgctgcaactacaccaatttcattaccattaccaacaccagttagttcatcaggtttatcatctactataccaattaattcaatttcaaaatctgaaccaaatgatgaatttaaagatgctcaaaataatttaagtaaaactaattcaaattcaagttcaaattcatcaattaaaagcacccatgatattactacaaacagtacaacaccatcacatattaattcaagatcaaattctagtacatcatttgataatttcagaaattctagttcaaatttaaatttattaggattaaataagttcccgtcaccgggatctgaatataaatttgctaaaaaattctcaagtccacaaattgctagaattgcatggagattaacagatccaaaacctgaatcaagatggggtctttatgaattattttctgatgaaacatttcaaaatttggaaatgtgtgttactgaaggtaataaagaaggtgtatatgttaatgttgaagaaagtgaagataatacagaaagtaatacagaaaatgaaaatgaaaatgatcatactgaacatttacatcaacatcaacatatcaatttaccgaaagaagctagtgaagaatctaaggatgatatgttagaattcaatccatcatcagttggtatatcgagaagtgaatctgagagatcaatatctacaacaattcaaatgaaatctggagatcatgtaattcatttagctaataatttacaaaatggtttattaattacacctaatgaaactactaaaaaggcaggtaaaacattatgtaagaaacataatcatttactgacatattaatatttataattccatatataccaatcaaacttactgtttatgtaataaacaatcacaataataatcatataatttctgctcacaccactaatatccattttaaatcgtaagctttcattataacaaactccaaaaaataaactttttaatccctcactgggtcttcccactgaataaactcccatttttccgcccacaatctttttccactgggaattcccgcactttgacacatttaaggtcttaaaactcacccatactacggattttgcaccggattttgaaacactgcatgcgtgcactttgataatggtctgcatcttgctatgcttcttgctatgtggtcagtttaaacccacgttcacatacgatgatggtcttattatcttaatgtgtggaaaagtatataagtaccatgtagtgcattttatttaaatgcttcagttataaaatatatgatattcattatttcattaaacaaacaaaaatgtctgcaaagcaattattcaaaatagttccattaacaccaactgaaattaattatttacaaagtcttgcaccaattgttaaagaatctggtgttactgttacaacaacaatgtatcaatatatgttcaaaacatatcccgaagttagaacttattttaatatgacaaatcaaaaaactggtaaacaaccaaaagttttagcattttcattatatcaatatattttacatttaaataatttaaaaccaattgaaggttttgttaatcaaattgttattaaacatgttggtttaaatattttacctgatcaatatccaattgttggtaaatgtttaattcatgcatttaaagaatgtttaggatccgcagctgatgattattttgttaatacattatcaaaagcttatggtaatttagctcaaattttaattaatgcagaagaggaacattatagtaaacttcaatggagagatttcaaagattttaaagtaactaaattagttaaagaaagtgaagatgttacatcagtttatttaacaccaattgatggtacaattcttaatccaattataccaggtcaatatatttcacaaagatggactgttaaaggtggtgaaaagagtgatgaaaatattattgattcacgtgaatattcaattagtaatgatttaattaataatgagtatagaatttcagttagaaatattggtaaagtttcaaattttattaataatgaattaaaagttggtgatattataccagttcatgcacctgttggtaatatgacgtataattctgctgaatctaaagaaaatttaacaattttagcaggtggtattggtattacaccaatgattacaattattaatgctgcattaaaggatggtaaaaatgttgaattattttattcaaataaatcagttaatagagaaccatttagagattattttaataatttacaaaatcaatacccaaatcaatttaaattacacgaatatatctctgaaaatggtcatgttttgaaaactagtgaattaaatcatattgacaataaaactcatgatgtttatttacttggtcctgttagttatatgcatgaatttaaaacttgtttacaaaataatggtattgaaaatattaaaatggaatttttcggtccaactgatccagattgttagctgttagagtttgtgtaatgtcttgtataaaagtttaggagaagctataaataaaatatattattatttaattattgatttgatttgattattaagaacgtatataataatctatttaaaaagctatggataaccggagtaaaaaaaaagaaacataacataaaataaaataaagtaaagtaaagtaaagtaaagtaaaagaagataagagtaagagtaaatttgtaaattttagtaaagtgtaattaatgtggggtataagtaaattaataattaataccaacaataaaaataacaataccaacaaatcaataaaaataagttgtaaaaataagtaaatataataatggaaataatggaaacaaattacttccttggttcttttggttttaataattcaaaactgcacattagttttttattaacattcataacagcaccccaatttttgaattcaccacaataatttggtgcactaaaaattgtaactaattttctatttgaataaaattcataaccatcttcgacaaccatatgacctcttgcaattaaatcaaaattaaatcttgaacaaaatcttttgatcactttatcattaaaacaatatgaaacacctctatcatttggtttccaatcactatttgattttgatttgaaattagagatatgctttgaactagatgtagatgtaaactttgaatttgaattttcattagatggtggagatattgataatgggccttttgtagattcatcatttttatcttgaggatctgaccataataaatctgctaataaaccttcatctggaatatcagttggtctttgaatttttttaatttgatttaaatcttttaaatccggtgataaaccaccatgaacacaaaaaattttatcagcaattgttgcagcaactggtaaggtattgaaaacatcaacaaacattttccaagttttaacaccattaattgttcttcttttacattcatcatagaaaccatacattttagtaatttcagcagattcatgattacctcttaaaaggaaaaaattttctggatatttaattttcaaacacaaaagtaagattaaagtttctaaagattgtttacctctatcaacgtaatcacccagaaaaagataatttgaatttggagggaaaccacaaagtttaaaaattctcagtaaatcattaaattgaccatgaatatcaccaacaattttaactggagcagctaattctaataacattggttgattcatgaaaattttacgagatttagcagatataaattttaattcatcatttgaaattggtaaagttttataatattttttagataaaccagttgaaactaatttttcaataattgaatcaatatcgatattaattttaattttattagatttatgttttgatagtgaaggtgaattagattgtttttgtggagtagtatgagtggagatattggtggtggtagtagtattaggtaaatctaatttaaatggtaaatcatttgacaaatttgaagatggagaagttgaaggtgaagataaattatctaaattatttaaattattatctttaatagaattaaaatttttattggtaattaaggaagaagcagaagagaatggttgttgattattgttaatataagaactagtagttgaagtaaagatactatcatcagaggaatttgaagattctattggaactgaatttatattattattattattattattattattattattattattattattattattattattattattattattatttttaatattattaatattaagattgttgatattatttgataaatcattaatattaattaagttattattatcattatcattatcattatttataatataatgataatgcggtatgggcaatggatcaggatcttcttgagcattttgcagagaagatgaagaattttgatcagaaccagattgattctgcggggggtttgaatttgatgttaagtcatttctactgggagagttgcccatattctagatatttagagtaagtaaataaagaaggatggatacagataaaaggaagatataaaatatacgataaaatattaatattaatactttaccaaattaatacctataactaataataatttgccacaatacattataatttaatttaatgtaatttaatttaatttaattattataattctagattattaattaattctgccaatttaaattaaagtgtcagtaattacgtaatattgtcacgtgactaatacggtcgatcgacccatagtattacgtaatctaaaaaaaagagaaacccaacaaaaaagctcacctacaaggctcagcataactttgccaacccaacagaaagttaaaataagagaaaaaaaatttaaactttcgactatctccacagtgcttaattccaatgatgtaagaactagtaataatatagccttaaagttactacttactgtctgttttgttttcgtttggctttacctcctctatatttttttttgactttcttgcttaacacgttattgcagattattttttgaaaccttatcgtctaatatttgcttgtttgcctatccttaaattattactattcttttccaattatcttgcttaatcttttactgttattcgtattttgcctaaataaatatattatattatattaaaaaaaagaattaattaaataacaataaaatctcctataaaatttaacaatgactttattaaatgtacctgtaggtgatgcaaaacctggtgaaactgctccaagaagaaactatttagttaaagatgctgctataattagacctaaaaattataaatgttcaactgtttatgaatttttcaatgaatgtgttaataaacatggtaaaaattcaaattgtcaaggttggagagatttaattaaaattcatacagaaattaaaaaagttgaaaaaattattgatggtgaaaaaaaattagttgataaaaaatggttatattatgaaaaatcaaattataaatatattaattttggtcaattacaatcaattgttaattattatggtaaaggtttaattaaaattggtattaatcattcaaatactgataaattacaaattttcgcttcaacttctcctcattggatgagaactttccttggttgtcaatctcaaggtataccggttgttactgcttatgattctcttggtgaagaaggtttaactcattctcttgttcaaacttcttcaactgcaattttcactgataatgaattattgaaaaaattagttaatcctttaaaatctgctaaaaatgttaaatttattatatttaaagaagatattaattttgataataattcatctaatgatgatgatgaattaataacagaggttaaaaaatcaattgaacaaattaaatctttaagacctgatattaaattttattcatataatgaaattattcaattaggtaaagaaaataatgattcaattgatttccatcctccaaatccaaaagatttatcttgtattatgtatacttcaggttcaacaggtcctccaaagggtgttgttttatctcatgaaaatatagttgcaggtattgccggtgtttcagttaatgttcctgatactttacttaataaaagtgatagaattatatcatttttacctttagctcatatatttgaattagttttcgaattaattacattttattggggtggtattgcaggttatgcaaatgttaaaactttaactgatgcttcatgtaaaaattgtgatggtgatatgaaagcttttaaaccaacaattatggttggtgttgcagctgtttgggaagctgttaaaaaaggtattttatcacaaattgaaaaacaaccttcaacaacacaaaaaatcttttggtctgcttataatttaaaagttaattcaaagaaatatcatataccttttataccatcattagttgataatttaatcttaaaaaaaattaaagctgcaactggtggtaatattagattattattaaatggtggttcaccaatttcaggtgaaactcaaagatttataacaaatacaattgctccaatgttaattggttatggattaactgaaacttgtgcaaatacttgtgttacaatgattaatcattttgaatatgatgttgcaggttcacttgttggttcaattactgttaaattaattgatgtgcctgatgcaggttattatgctaaaaataatcaaggtgaaattttaattaaaggtgcaccagttttaaaagaatattatcaaaatcctgaagaaactaaaaaagcttttgaatatgaagaaggttggtttagtactggtgatattggtgaatggacttcaaatggttcattaaaagttattgatagaaagaaaaatttagttaaaactcttaatggtgaatatattgcattagaaaaattagaatcaatttatcgttcaaataaatatgttttaaatatttgttgttatgcagatgaaaataaagttaaaccaattggtattgttttaccaaatgaagcacaagttaaagaattaattgttaaattaggtttaaatgaaggtaaatcagctaatgatattgaagtttcacattttactaataatagtaaattattaaaagaattaaataaaagtattttagaaactggtaaatcaggtggattaaatggaattgaattaattttaggtattgttttagttgatgatgaatggacaccagaaaatggatttgttacatcagctcaaaaattacaaagaaagaaaattttagcaagtgttaaagaaaaagttgataaagtttatgctgcaaactaatttaatttcttttataatcattgatgatggctgtgataatgtatgtatgtatatgtgattttttttataatgataagtatagtatataattttaataataataaaaaaaaaactaattaatcaattactttttttagattctaagaaattcatttcattaccaacaatttcattaaatttattaaatgcatcaaggtaaatatgatgacctgcacctggtacaatttcaacaatggaatcatttgaattatctaatttaccatttttcaaattaatattatttaatttttcacaacttttaataccaccattaaagtccatccaatcatttgaaccataaagccaaattgacctaaagtttgtaaattttaaactttcaattctatttaacagtggatttttaggtagtgcaccaggtgataataaataatttagcatatattcacctgaaccttttgcattaaaaattgcataagaatatttatgtaataatttaattgtttcatcattaaataaattattaattgaaaatctacgacttgtccaaccactaacaaaatatgaacctaatggaccagtatttctaactaaagaaaatggtgaaacatttaaattccataattttgagaaccaagttggtatctttgcctcaatttcatgagaattttcatgatgtataccacctggtgaaactaaaattaatgaattccaaaaagttgttggattttcattagttttacttaattcttttaattgattttgaaactttaaatttaattctatattatctttactaaatctattgaaaaaatccatttttatttttcaaaatttcaaattccctttcatttataaaattttctccattaatttcattcatttgtaataatagtgaaaaataaccacccattgaatgagcaactgtaattgaattttcattatttaatttattaaatttataccaatcacttaatggaattgtaaataatttttcaactaatttataatcattatttggtatattaaatgggaatttaactcttgttgaacatccataacctggtaaatcaattgcatgaatattccaatcaggatattctgaacttaatttttcaatatttttaatgaaaaatcctaatcctgcaccataaccatgaattataactaaatgtttatccttttcagttggatttaaaggtttaacatgaaattcatttatatcaggggaatagaagagaatttggtgatttaaattgttttatttcagatgaatgagttttcgatggttcaggataaaatggtaatgttgataataattcatcttgaattttcaaaatttctttacgagttttataatcttgaaaactttcattaaatgataatgggaataattttgttgaaacttgtgataatggtacaccagatggtgaagttggttttctatatgttgatgatgtatttgaagttatattattagttgattcagcttcctgtgttgttgacattgatatgattgatttaatttgttgggttttaaacggattacgtaatgatcggatattcttgggtattcgtatactaatgtgtgaatttaatataagtaatgtgttcatacaagaaccttttaatttagtgatgaaagatgtataggttgtgtttatgatttaaataaaataatagaaataaaagaaaactaataaaaaaagaaaagatcatcaacacaatataaatatgtcaacataaaatggagataagaaaatattcatgttgaatccatcaacaatacttatatccgagttttaagtaacggatttaaataaacgaatattcttttatcaataatactaatagtaaaaaaactatgaaggaagcgaggttcgaactcgcgcggacaatcgcccaacagatcttaagtctgccgccttagaccactcggccatccctccaattgttaaaaaatattgtatatggtctgatccgtaattgctattctgctgacgtaagcaacgttaattaaaagtggttttttttaaaaagtgttaaactttataatttacccgttttttgttgcttaatatcactctattaaaaaaatgactgaaatgatttagaattgataaagaatacagcagattaattattcacaagtataatttttttttaaatttgaataaaattattctctccgttattatttgcctctttatactagtccttacactacaacttatataaagacagtagaatacaattcaatataacacaatacgccatctacaaactgagcctacctcctaatattactaattaaaaagacacgttgaatttactgaaattttaaaagatggcgcgtgtcatatattaaattgtcacaatataagctgagcattattaatatttgcccccaaagcttcactgaggtgtccttttcaattattcatcactgatttagttatcacttccttttcttttcctattttatcttaagtctattcttcctcaagcatacacatctataaacaatgcaattttcaattaaagctattgctgctataatggcagttatttcaaatatcacttcaattaatgcagaagaagcaattgcacctgaagattcagctgttgttaaattaactgaagcaacttttaatgatttcattactaataatccttatgtcttagctgaattctttgctccatggtgtggtcattgtaagagattaggtccagaatttgcttctgctgctgatactcttaatgaatcagatccaaatattaaattggctcaaattgattgtactgaagaaagagatttatgttcttctttcgaaattagaggttatccaacaatgaaagttttcaaaggtgatgcttctgctatttcagattatccaggtcaaagagattctgatgcaattattaattatatgcgtaaattaactttacctgcagttcaagttttcgaaactgctaaagaattagatgaaaaattagaaaaattagctgaatctttcattcttcaaatattaccggaaggtactgaatctcaagcttcaaatgaaactttctatcaaattgctaataaatatagtgaagctttcacatttgcttcaacttctgataaaaaatttgttgatcaatatgcaaaatcttctaaaactcctgcttatgttatcttcagaaaaggtgaagaattatctgatgcttcagtctacaagggtaaatcaattgattcagactttgaattattagttgattttattgatgttgaatcaaaacctttattcggtgaaattaatggtcaaacttatcaagcttatacttcatctaatttaccattagcttattatttctatagtactgaagaagaacgttcagatgttgaaccaatcatcaagaaattagctaagaaatatagaggtgaagttaattttgttggtttagatgctgttcaatttggtatgcatgcacaaaacttaaatatggaagaaaaattcccattattcgttattcatgatcttgaatcaaataagaagtatggtattgatcaatcaaatgatctcgataataatgatattactcaatttgttcaaaaattcaaagcaggtaaattagaaccaattgttaaatctgaaccagttccagaatctcaagattcgccagtcttccatttagttggtactgaacatgatgcaattgttaaatctggtaaagatgttttcgttaaatattatgctccatggtgtggtcactgtaaaaaattagctccaatctttgaagaactttctgaattatatactggtaaagatgttattgttgcagaaatagatcatacattaaatgatgttgaaggtgttactattgaaggttatccaactttagttttattcccagctgatggttctgaaccaatctattatgatgatgcaagatctttagaagcaatggcagatttcattaaggaaaaaggttcccttaagattgatgcatttgctgatgaagaagatgcagttgttgaatccgaaaccgctgttgaatcttcttctactgttgaaaaagttgaacaaactgaagaagctgaagctcatgatgaattataatgatattgtcatttactagtattattagtattaaatattctttttttattttataatttacaattgttcattaaccggtttatatagataaatacatcaggttgtttgttatataagtacaaaactctaatctttagtaataatttgtgaagctgccttagataatctattcataatggccaatccttcatcctcttcactaacaccttcaacgaaaataatgtcaaccttatgtgaatctgaatctcttaatgcagcaaacaaattacgttgtatttcatcaccacttttacctaattcaatcacaacatctgcatcattgactgactttaccccaatatttggatgtaacaactgaaaatttaattttttctaagtctaattcgttttctaaagcatatttaataattgcttcattaccatctttgaaattttcaaataatataactttagcacttggtgaataatgtttatatttcataccaggtgtacgaaccttttcgtattgacctgcagtcttcttaccgagaacaatgttttcccatccatttccaattttccttatatcttctaaactaataccacctggtcttaataacattggaggattaacagttccatcaacaacagtactctctaatccaacattacattgtccaccatctataattaatggaattttaccttgtaaatcttcaaatacatgagatgctaatgttggtgaaggttttgttgatgcatttgcagagggtgcagctaatggtagattcgatatgtgtattaatgcacgagctattttatcatttgggaatctaactgcaaatgtattttggccagctgtgacaacttcagagacagaacattcattagatactggtaatacaatacttaatggacctggccaaaatttctctaataatggtttataaatttcaggaatttcagttttaaaaacatctttaatcatattaattgatgaaatatgtgaaattaatggattgtctgcaggtcgattcttagctgcatatattcttttaactgcatctgatgataatgatgatgcaccaagtccataaaccgtttctgttggaaatgcaactacttgtgattcatgtaaaagttttgatgcttcatcaagcacttttttagtttcattatctgtaaatgtaacttcgtttgtcttttcatcaaaaataatagttgatggatcaattttaagaattttcgtattaaaatctatcatttttattctgcaattactgaaaaatcttttgcttagaaacattcatcaactattacagctaatatgaccaaataagatataaagctttaagttggaaaaaatttatcaaaatggtaatactaaaaaaattgacgtagatcacattttcatgattttttcaaattactaaattaataaagtctgaaaacaacaactacttcttttcgaatcgttggcatttatttccacttacttacttaactatacccaaatgtttggatttgcaaagaaattagtcagttctattgaatcacaattgtcaattgacatatccaacaattctagctctaatatcgatgaatcccgttatggtttacgtattctttcagtgaagccaaattcaatcggttcaacacatggatttgaatcatggttcgatttcatagtggcacttaatggtatggatatcaatgcatttttagaaattaatactgtttcaggtaatgtcggttatagtaatatgattaattatattaaacatgaaattgaagtctctggtaatggtataacactttcagttttttcttcaaaaggttcaataatgagagatattgtaataaccaatgaagaattcaaaaatgcatccaaaattggtaattctgatctagaggaaataaatttaaatgctaattcaactaatgatgactggaatccaagtttaggtttatcatttcaactaactcctttaagtactggattcttgacttggcatgtcctgagagtctcacccggatctcctgcatatttagcaggtataatgccagatgaatatataattcaatcacaagatggattacttgcaactggtggtgaagatttattaggtaaggttttacagagtcagtacgttaaaaatggtgatggatgtcaagttgtattatatgtttataattatgattcagattgtgttagaccaactacagtaatattgaaatcaggttcaagttggggtggtagaggaattttaggctgtgatgttggttatggtttattacatcgtattcctgaagttgtaggtaaatttgattcaattaaatctcttaatcaagagttaccacaaacgcaaggtagttcgacaattgaacaaccaagtttgcctgaaattccactttcagaaactccaaatattttaccaatgaaagtagctgcaccaagtttcaacacttcaagtgaaggtgaaactattgaacaagcatctagatcagttgttagtaatcaaaatagaaaacgtggacataaaactacaaatgtaaatgttaacttggatgactattttacagaacaaactaaagccaatgttgattcagatggtgcaagatcaacaccaagctcagcaaatgtaccaccaccaccttcttttaaaaaaatagtagaataataggattgatttgaattctataaataatatattaggttttatataattgaattttcagtaatactgtcaataattcttaagcatcaacaatatcataaagtttttccaaatcataggtctctctccaatgatcaccattcctaataataatcactataagtatacttaaaactgcagtaacaccggcgcatatactaaacaaaacaccagtaccgatagcctttatcagtggttcagttgcaaaggaaactccagccgccataatcattcttataaaattgttcaatgcaataccagttgctcctctaccaggtaaacaatctgcaagatatgtaacagtaacaccaataacaatcatttgagcaaacccaaacaatgcggttccaatcaatggtgtaacccattgttcatgatactcaagacaccaaccagtaattaacaatgataatggaagcattgcagctgcaacataaacattaataccaaatctagcttctggtgcaactataccatatttttcaatctttttctttaaaagataatcgttaaacttaccaccccaaatagaagcaataaagtatgtcactgagtttggaacataaactaaaccaactaaaactggagaaaagttatatggtggtcttgaatacatgtatgttaatgtcatattttgaacgtataaagctgcaaaacaaggggcagaatatgccattgccaatgcgacaggtggatatcttataaacacaaatgatttcaatgggccataaagataaattttagtataatgtaaaaatagtttgaatttactaccatgagctattttatgaattgtttcaagttcatccgctaatttcttacttttctgagattttttcatctcttcatgtttgattgtagtagcagttgggactttagataaaggaacaacagaatccatcactggcatttcataattatcatcttcatcatgtccaatttcttctttatctaaaccttcaccggaatcgattgatttaatttcatagttcatttcattttcacttggaattaaagctccttgaattcttgcattaccagaaacaacagacggttttctacttttgggtttcacagaaacaaaagatgattttctgcttctgttaatatcaccacctttattagagatttctacaatcgaacgatgtgttgacattctagtcaaaagtttattaagatgttcaacttcttcttcatcaactggtattttgtcattatcatcttcatcaaaaacattagagtctatagaaccaactggagaaagtggactttcgttatctaaaactaggtcattattaatagttttagatggatttgattgggaaacctctgcattagtaatttgatcattatcatgatgtgtaaccttttcaatatcttttgtctccttaatggcagtttcttcatctttttttacaattttatttctccttctatcacgtaatatttgtctaatagcttccctattatcttgttttcttaaagtttcaggtaaaaagaatataattaataaacagcaaccaccacttaaacaaattaaaaaccattgagttgcacgccatccaaatttcttgttactggtaattgcaccaccaatgattggacttaaaagtggacctgcaagtggccccaaatagaacaatcccattgctgcacctctttttgttataggatataaatcaccaattgtaccggccccaacactttgaacactagctgcacaaccaccacttaaaacacgaaatccaataagtgtattaacattgtttgccaaagcacatccaattgtaaagcataagtataatatgaatgatacaacataaattgatcttcttccatgtctttcggataaattactccaccataaaggtataacacctaatgtaataagataaacaccaattgcaacatttaaaatggtaatagttgtaccaagatcttcaactgcattatctgatgctggtaataagatggaagtacccattggtccaagcattgcacaaaaggcaataataaagacaataactcttcttaatgaagcgggtagatttcttgcatcttgatattctgggattaaacataattttgataataatcctcttctttccttaacggggacaattaagctatcatcaaactttacagttgtgattcgggacaataaagtattggatctagttattccgttgcctagtttttcacttttcggtttatcatccacaaatgaattttcatcaccatattttgaattccccaatgatgaagttgattcatcctcatttgatccatgaagatgacgtacagtagtataatcgtgtgaattgggatcaatatcttcactatctaaagattgtgtatctggggacagtttagaaattattatgttatgttgtcgttgatttgttgaaggtcttctattgtttgacattgtgttttatttgtacctggatacatatatctctatacttttaaaaaaaatatggacagaatcaaagtcattgatattagagtcatcgaagtggacttccagttacttataagtagataaatttttttcttatcctattgtggtgaaaattatggaaattttcggagcagatgctgcgcaattccgaagttctttaacttactgtataaagggtttataaattactataattacataaaagatcatcatttaaatgcctctgcaacaagatctttcaactcagatgcaacagcatcatctgctactatttccacattcttggaagcaatttctttatctttaggatttggtaatagctctccaaacatgttatcgtaaacgtcattttcattaaactgtgtttcttcggcatcattctttccaaaatcatccatcatataagatttagtagcttcagcaacaggattactcttctctctcttagctagattaagtttggaactcattctcttatacttttctgaatctcctgtagctttttgaagataatcaggaacgggtaaattattctttatgtggtaaattttccagtttcttgccttatccttcaactgtaatgagcttctattcttcaaactttcattgatttgaccaccaggtccatataactctaaaatagcagtccaatgtgtccctttcttcttcaaaccttccttaagagcattttcttcctcagctgtccagattcttctaaatgttgatggtctattatgtttagccttcttaggtttagatttaggtggagtagttggcattgttgatgtaattaccatttctgatgaagtgagcttttcactgtttccatcaattcccttatcatcagtatttggagtagcattcagattatcagtactgtatgatctgttttctgttattgaactatcttcaatttcagaatacgatctcttattattattattattattttctattccagaagcagcagtaactgaattattagttctagctggtatattatctcttattcctgatatttcgtctctttcagtcaatgcaaaactttcattcatcgcatgtaatttattcaattcattagccattttaccctttggaccccaaattaaaaatccaacgtttttggaaacatattctaataagtcatttaaaaacttgatccattcgtatttttccattaatgtactgtccgattctgcttttaataatgtttgttttctaaaatcacatctgtttaagaaatccaattcggcaggtgtaaataatgtttgatttctttcaattggtttaccattagattcataaaacggatctttacgacgtaataaaatttcatccatatttttcgggaataaatcatgaattatatcttcctttgatctatcacctaattcgatagctgaaatataagcttgagttttcaattcaagataaagaattgcttgtgcttttaaaaatttagtttgatttctttgtaatgttgaagttgaaccatcatatctcatatcacttgatgtcagattttcatatagtttattatttttcaaaaagcttagggaatcaactgggtcaagattttgtggaggacagaaaacatcaaggaaagcttcatttaagaagaaaaaacctaaatcaattaaacctaatgtagcaagtaaaaatgttgaaagattgacttttcttaatgttccttcaattgtatcctctctaccatgtaaaaatgtaggagctgtatgaccatatttccataatccaaaagttatattttccactgtgaaaaatggactttcctctgaactgtaaattcttttcgtcgtttcgaaaagttccaccagattactaaatgcgatacccgtatatgattctctatttgacactaactccataattttttgatatggtcccttggcaacaattctcaaaatttgggttgctaaattatctagcactggtaatgtattaattaacatttgaacattaaatgataaattatcaggtgcaattaaagttaggggtaatgctgataattgtgcgttgacatgattaacttctcttattcttgatctatttgaatcgtttattaaagatctatatgcatctaatgcagattgtgcttttgagtcgtgtaaaagttcactatttaatggaatagatgtatttctttgagtttctgttgtagttgtcagtatatcgaattctttatttttattttctactgttttattttttgttgttatatcagtaaacatagattcggtttctttagaagtgttggttttttcagttgtgaaactattggatgatgacccattggtaactgctgattctgattcattattccgactttcattggtctcattaatagtagcttcaacatctttctttgtttgtttagttgcttcttcaagttttttgatatcttcatctaaagtacttattttctcagtttcttctttatcttgttcttcctccactactactactgaatcagtaatagcatcattattcttctcaagttctttattctcagttttatcatcaacattattagattctgtttcttcatttaaatttttttcatcaaatacatcattttgtgttatcgactgacttaattttgaagattttgattgaatttgatcatttgaaagagtaacattatctgtcatcaatttacgtaaatgaatatcaaaatcagtatcagtaatattttcaatatccagattcatttctgattcaaggaaatccatttcatttttacttaatcttctttttttaaaattttctgaaagagttgataaacttgtctctatttgatctaattctttctcaaaatttgtatcaaaatttttcgattctaaagtttgttcattatcatcttgaataacatccttatttatatcaattgattcctttgcatgaatgttattgttattgttattgttattttcatctacgttactttcatttaaaccttttcctgaactaatttcaaccgaatctgtattagatgtcgtgctgtttatattattagggttctcgttctctaggttcgacattttcagatatattactttatattatattctgattggtatctttttataattgagttcaatgtataaatgattcaagggtgtaagtaaattatctctaaataaaacttaaaaaaattgtaaacatgaaaataaagtaaaaataaaatttacaaacaagaaaaataaagaaaaataaaaaaaagaaataattttttaaatttctgtgaagcccgtcgctatcttttgctttgtatagtgaaggtgctgttttgtacattgactgtaatgatacttctatgctataccgtatctggtggtattgtattattggagtatattactaccgattacagagtatataaattgaatttaggtgataattgtatcataatttagtaaatcttatccaaaccgtcgcgtcgatgataataagagatattcaaagtatctccaattacatcttacctttttactttcataaagctgatcatataccgtacctctttttatgataccatacttatatacatcatggacaagagaccatacagcatggtgacatttaaatatgcatgtatacttttctcaattaggaaataacccgtacacctaataacatttcctaaaagggtaatgacgcgaaatgaaaatttcaaaacggcattgtaacaagacttttaaattaaagatcaatcaatcttgcaggagaagacagtattgaaatattggagacctgcactgtaccttcttctgtactccacttattagagaatgtcatttgaaagagcggatatatacacaacatctgttttgcctcctcaacaggatgcaggaaatgatcaaaacagtgaaatcattaaagcttttaaacgtttcatattagaatttagaattgataatgattttgtatatagaaatcaattaagagaaaatatattatctaaacaatataaactaactgtttattctgaagatattatatcattttatgatgaattacatcaaaaattgattgaaaatccaaaggaagttataccattatttgaaagagcgattactgaaattgctaaaagaaatatttatcttacaaatgaagatactccagttgttttccctcaatgtcaattaattttattatctaatgaagcaagaatttcaattagagatatagattcagataatgtctcaaaaattattaaaatttcaggtataattattaacacttcaatgcttaattcacgtgcatctgaattaactttgatgtgtagaaattgtagacatacattaaaggttaaatcaaatattaatttaggtttacctcaatatcctaaaaaatgtttagcacctcctcaacctgaaggtgataaaccagattgtcctccaaatccttaccttattgttcatgataaatcaacttttattgatcaacaaactttaaaattacaggaaacttcagatatggtcccagttggtgaaatgccacgtcatattactttatttgttgatagatatttatgtaatgttttggttcctggtacaagatgtgaatatgtatttatgatacttatcagaaaaaagttcgaaatcaaggttcaattaacaatgcagctttaagaactccttatttgaaagttttaggtgttacaacagaggcagatattttaagatcctcaggcggtttgaatagaatgttttcagaacaggaagaagaagaatttattagattatcaagattaccaaacttatatgaaaaattcgttaaatctattgcaccttcaatttatggtaatgaggatattaaacgtgcaataacttgtctattatttggtggttctaaaaaagttttacctgatggtatgagattaagaggtgatataaatgttttattattaggtgatccaggtactgcaaaatcacaattattaaaattcgttgaaaaagtttcgccaatttcaatttatacatctggtaaaggttcatctgccgccggtttaactgcatctgttcaaagagatcctgcaactagagatttttatcttgaaggtggtgcaatggttttagctgatggtggtgttatctgtattgatgaatttgataaaatgagagacgaagatagagttgcaattcatgaagctatggaacaacaaacaatttctattgcaaaagctggtattacaactgttttaaattctagaacttctgttttagcagctgcaaatccaatctttggtagatatgatgatatgaaagcacctggtgaaaatattgattttcaaacaacaattttatcaagatttgatatgattttcattgttaaagatcaacatgatgttcatagagatatgtcaattgcacatcatgttatgaatgttcatacaaatggtggtacaaatgaagaacaaactgaaggtgaaatacccattgatttaatgaaaaggtacattcaatattgtaaattaaaatgtgctccaagattaacacctgaagcatctgaaatgttaagttctaactttgttggtattagaaaagaagttaaagcgaaggaagctcaatccacagaaagatcagtcaattccaattactgttagacaattagaagctattattagaataacggaatctttagctaaaattgaattatcaccaattgcaacagttaaacatgttgaagaagcaatgagattatttaatgcatctacaatggatgcaatcaaggaaggtaatacagataatcctgaagttattggacaaattgaaacaatggaaagtgaaataaagagaagattaccaatgggttggagtacttcatataatactcttcgacagacatttgttgaaaagggtaattattcaattgccgctttaaataaagctctgcatgttatggaacgtaaagagaccatccaatttagacataataggtcaagtatctttagatgtggtgtgtagattatataaatttattattatatgtattttactttaattaattactgcttttactaatcttataaattaaacaatgacatgaaaaccttctttacccttgttcaatcccttttgaacaattttttcaatttcatatggatcacttgttatctttgtgaaattttcataaccatctttagtaactaaaatatcatcttcaattctaacaccaccaacgtacatatatttttcaacaagttccatattaacatacttcttttgttcctcagttattttttcaattaaaaatggtgaaaaataaatccctggctcatcagtaacaaccatacccttttgtaattttcttctcaatcttaagtatcttaaatatggattttcatcttcatagtttggatatccaccaacatcatgagtatccatacctaaaacatgacctaacccatgaggatagaaccatactgaaacttttgaatcaaaaatttcttcctctgtaccattttgaaataatcctaattctaagaaatgtttaataagaactttatgtgataaaagatgtaaatcatcccataaaacaccaggttttatttgttccattacctttgtttgcatatctttaacagcaagataaatttctaaatgttccttggaaaatttaccagtgattgggaaacatctagtgacatctgatgcgtaacatttccattctgcacctgcatcaattaaaacagatgttttaccatccattggatcatcatttttaacataatgtaaagtgccacaagatgggccagaacaacagattggatcataggattgaaatttagaaccttgtctaattgaatgataaacaaattcggcgtgtaaatgagtttcattactttcaattggtaatgcagacataacagctaaatgacaattatcagtaattctagctgcatgtctcattaattcaatttcaaattcatccttaattaatcttgattcatctaatgcatagaaaaaatcaatatcacctgaaattacatccttagagaatggtttagttgaatactcatcaatatcagtggtataaatattaacatttttctcttttaatgattttaatgtattttctacatctttagcatataaaacttcatcaacatcgtattcctttaatgcatcttctggtgataatggtaatccactccacataatatcatcagcatcaacatctggtaagaataaggttaatttatccttaagaacatgatataaaacataagcaccagagatttggtcaatacctgttaaataatggaaatatctattttgtctaattggagcagtttgatcacaatatgggtattgttttaaaactgcagatgcaatgaaaaatgcggtgttatctgctgtagctgatacttttttatttaaaaagtgttgttgaacattttgggcatgtgcttttgcaggatatttcatcatattaatcgcagatcttaataatgattcagatttattcatcagataactcaaagtcttcaaaaatttgtaacattaaaaagttcatgcacatccaattccaaacagtgatctcatcagcatgaatccaccagctctctctgccatataatataatgataccaagatagacttagctaagcgaggacttcagggcctcatggttgaatggctgattcattacgtaatgcttgacatgtttgtttgtgtggaatttactttatgttgttttatttaaacagtattataacagctggctagctggtataggagagggatattgtatgatagagaagcgtttgaatgatcaagttgaaacagagagtgagaactcatccaaaagacagaaaatagaagatgaatttgatgatttagatgatactgtaaagtatgacaatgttgaatcatcttcaaaatacactgataaagacacttatttagatacaattaacaggaagattttaaattttgacttacctagagaatgtgcaacattgattgctacaacaaatattcacatatgtttagtatgtaataaatatcttcagggttcatcaataaattctccagcctatgcacattcaattgatgcaaatcaccatgtgtttattaatactgaaaatggaaaatttattgtattaccggaacaacttaccctttcacctaataaagaaaaggaattgattgatataaaattagcacttaatcctgaattagacaccgaatttattgaaaaatttgatactgaaccacttacaagccaaacattgaataaagagatctataacgtcggatttgtgccaataattgatgatataatagtgaaagatgatacctctaaagataatatagatgaaagtactattaaaatgactaaccataatgctatttattattcaattgcacatttatcacctatacgaaactatctgataaatcataaatcttctgacacaacaccattgacaaatcaattatctttattaaccaaaaagatatggtctccttatttattcaagaaatttacctcgtcttatgctattgagaatttagttgtctcttataacttacctacacaaatatcctcaaacctaagattattttacaattggttaattaacaagcttctctctgagaataaagtcttgaaaaattattttactggtaagttagttatgaaagatgttgataaggaaaataaatttgtcaatataagtataaaattacctcaacagtctattttcaaagattctatgtccacgtctattgaacaatatgatttaatgaaacttatacgagataaaggtataaatattcgtaaatatccaaagattttagtcatttacattgatcgtacaaatgatttaatgattaagggaattaatcaaaaacttaatttaaacattgttaaatatgatccagatctattacaatttggtgaaaatgaaaagtatcgtttaatatctaatataacttatgagaacaaagtgcatgtttttgataatgcacgtaaaatttgggttgaaatcaatggtaagagtattaaagaagttgaaaaagatttacttttcatatctaattgtaaactacaattctggataaaacagtaaggattaaaaaaagatataattattcttcagatttctagagtatacaaacgatatgtttaaacagacatttttatatagctaatttattaacattacttgtaactattgaaacgttattttcttcgattaaagattcagcagtttcagctaaatgtttctttggatcttgtttaccaacatacctcgtcttcaattgatcttctgttaatgttttttcttcttgaattctttcaacatattgtttagcaacttttattaatttctttgaaccatctaagttaccacaatcttgatcatcataatttttcaatttaagaccatttgtccattcttttttatgtaaatttaataacatatcagtttccttttcagttttcctataatcaatattaagagaataataacttctatttaatccatgaagtaaagcttgaatagttggtttgtttaaaagaccaacattagaagtagtttgtcttggttcttgacccatcattaaagcttgtgatggaattgatctaaatgcatcgataacaactttacccttaacactttgaattggatctataacaactgcaacagatcttggatttaattgttcaaaactttcttgggtattaacatcaacacttgataaccaacaaccaaaacctggatgtgaatggtaccatccaacaactgtttgatctctacctgtttgttttaacatctccatcattttagtttggaaaacatcatcaactgcttcgacggaaacacctgtaccactttgaggcattgcaaaaacatcaacaactgtaattgtataatcatctactatttcacctaacattaaacccataacttccataggaacaccggcacgtccatgttttaacattttcaataatgcaagtgatgaaatataaacggtttctgcattatcaatagatggagcttcttgaagtcctggacctcccattccacccatacgtcctcctaataatgattgtaatctctccatttctttgtttctattgctgtgtggtatgtaattaagaaagaaacctaattgaaatcacctacaagaacaacttcaatggaagatggtgataaattcgccctcataaaaaaaagccagtacgtacaaaaccttaggtttaataatcaattttacttcctgcttttcttgaatctccttcttttcagacaatttcaatcagttgagcgatatactcctattgaacaatgtcaattacatttaacttatccaaaaatccaatttatgatcattgttttacatcagatagaacacatgttgcaattactcaaggtaaagatgtattgatttacaatttacaaaacccatccaagccacaattattaacaactttgaaacatcacgacaaaccaattacagcagttgatatctcaattgatggtaaaattgttacatgttcccaagatagaaatgcattagtttggacattacaacctaatggtgaatataaggaaacattggttttattaagaattaatagagctgcaacatgtgctaaatggtcaccaaacggtaagaaattcgctgttggatcatcagctagagttatatcagtttgttattttgaagaagagaatgattggtggatttcaaaacatattaaaagaccaattaaatcaaccattttatcattagattggcatgaaaataatgttttattagcatccggatcaactgatggacatttaagagttttctcaactttcatcaaaggtgttgatgcaaagccaaatccaagtatttggggtgaaagattaccattccaaacattatgtttagatgttaatttatcatcatggattcaagatgttaaattttcacctgattatcaatttgttgcaggtgttggacatgattcaagtttatttgttgtctatccaggatctggtgaattggaagttagtaaacttgataagattaaaacttctaatttaccatttacatcagttatttttgccaacaattctaaacttatctgtgcaggttatgattgtcatcctattgtttttgagggtaatgcatcacaaggttggaaacatacatattccattgatgatccaaccaaaaagaaggtcaatgtagttgaaaatcaaagtgcacgtaacatgttcagacaaatggatttaaagggttcaactgaacaaaaaagtaataatttactcacaattcatcaaaataccattactcaattaaaaccatttcaatacgataacaatggattaattagatttagttcatctggtaatgatggtaaagttgtcatctttgatgtttaaaatttatcaatggaatgattttttgtgtaaatttatttaggtagaagattagaaaaaatattaattaacaattatttagtatacaaaaaatgttgggatatattatataaaaaagtagtaacagaactattattggttatcattattactttctaattgatcagcaatttgacggtggatgtcaacatcttcatttgataatgagaattcttgattgattctattaacagtttccattgcttcttcatctaagtctacatcttcatcaagattattttcaatattattattttcaatactatgttgttcatttttagaactttcatttaattgattctttaatgagttacttatttgagatttcgcaaaattagcaatattttcatttacattactactagaattttgttgatcattacttgtctcacttgattccatttgatttgaatccacttgaagtaacacattatgaacagttgatttgtatacagtacttaatataccaactgatttttgtagatctgtagaaagttcagtaagattttcaatgtttgtatcactaactgaagaaatttttctattgatatcttcaagtttgtcctttaaagaatttaaattaacagccagagcttgatattcgttcaaaagttgtacttcttcatcagtgagtgaagattttaaaaggttgaaatcaaaacttagaatatctgacattgtccaatggtgattgtctcttaattgctatgttttacggaaagaaatgaaagtaaaaaaagagagaattgcagaagtaaaattgtaaacatgaaaatggtatatgtatggtatataaaaaaatcggagaatctggtgcgaaactctttatttgggattcgaattgggtgtagtgtggctcattctttaactgctattagaaatgtaatgttgatggccaacaacaacacccccaccactagtaaataccccattgatgttctgagtgagtacgtaaaaacacgatgacttttatagttatagatactctgcacataggacagtaatcccacaaagagagacagcatactcaatataacaaatagaattgatactgcataactgaatcttgggaaccatggcggtggatttttcagtttaggtaatttaccaaaattagaactagatgtatctaagcggaaatctgtagcaatggtaacagcaattgcggaaagtgttatggagaatttagcccatgagagagctgttctttcaatcatgagaatatcacggggttcgctggcggtgttatctaccatcatctctgtacccataataatactccttactttcttcaagttgattgacattttttatctatgtttgtgtttgttaaaggaagaagagtgaagtacatggtctgtttataaggttacttcatgataatggctatattacataagaaacaataggaatgcccaaataggcaagtcaggcgatacattaaaaaaaattgaaatttttcactaagaaaaaatttttttaatcttttatcacttgaattgtgattaaattattaagtattagtaagtgataatattgactatcttttctcctttaataaggttatttcagttgattatactctacaaatatgtctaattactccaatatgcatacacatgacggtcaagtcactcaaaaccaacaaaatcaagcaactgttttatgttgtaattgtggtgttccaatggatggttcaacaggtttagttatgtgttacgattgtatcaaattaaatgttgatattactgatggtattccaagagaatcaaatttaagtttctgtagaaattgtgaaagatttttacaacctccaactaattggattaaggcagaattagaatcaagagaattattagctttatgtttgagaaggttaaaaggtttaaataaaattagattaattgatgctgcattcatttggactgaaccccattctagaagaattagagttaaattaacagttcaaggtgaagcatttcaaaatgcaattattcaacaaagttttgaagttgaatatgtggttattgcaatgcaatgtcctgattgtgcaaaatcttataccgctcatacttggaatacatctcttcaaattagacaaaaagttccacataagagaactttcctttacttagaacaattgatcttaaaatataatgcacatgttgatacaatttctattaaagagaataaagatggtttagatttttattattccaaacaaaattatgcagttaaaatgttagatttcttaaattcaacagttccaataaaatctaaaaaatctgaagaattaatttctgctgatatccattcaggtacatcagtttataaattctcattctctgttgaaattgcaccaatttgtaaagatgatttagttgttttacctgcaaaattagcaaaatcaatgggtaatatatcaagattagttttatgttctaaaatttcaaattctattcaatttattgatccagcaaatttacatatagaagatttacaagcaagtgtttattggcgtcatccatttaattcattagctgatgttacacaattaattgaatttatagttttagatgttgaaccaactggtgaaagaaagggtaaatatttaatggcagatgttacatgtgttagagcaagtgatatgggtggttcatcaaatgaagaattttatattagatcacatttaggtggtcttttacatccaggtgattcagcaatgggttattatattaaaaattctaactttaatagtgatttatatgaagaattagatacaaataatattgctgatgttgtcttagttaagaaacattatgtaagatctaataaacgtgcaaagaatagaaactggaaattaaagagaatggcaaatgaaagaaaggatattgttgcaactgaagtcttagattcaagacaagctagacaagaacaagaaagagctgaaaaggattatgaaatgttcttacaagacttagaagaagatgatgaattgagacagaatatcaatttatataaatctgataagattaatcaagttaatgaaggtgatgatgatgaaataagcgaagatgaagatgctccacaaattgatattgatgagttattagatgaattagatgaaatgactttggatggttaaaatcaatataccatttacaatcgacaaatcgaacaaaatgaaaactttacccattcttaccttttttctatataaattaataataataatgtaaataaataactatataagcataatattaagtacaaaccacacaattatttacttgcattaactaatgcagcattaataccttgaggatttgcaccaacgattttatcaacaactttaccatgtttaaaaactaaaaatgttggcatagcagagataccataatcacgagcaatttcactgatttcatcaacatctaatttataaaaatccacattagtatgaacgtcactgaatttttcaagatatggtgcaatcattttacatgggccacaccaagttgcatagaaatcaacgaatgcaattggtgattttaaaactgtatctttaaatgcagctgatgaagtaatttcattaacttgcaatgaagctcttgacgcatgaaacatacgttttgaagataatcttaatgtgttaattgtggttcttgaggcaaacattgtcttgtacttgaaataaagaactaactaaaagatatcaaagatcaattgaagatatttcactattactaatcctgtatcttttccaacagcttcatgttaaaagaccctgtaatatatcactagaaaaaatttagcgacgcatcgactgcttggtattttaacaatgctttgataatgcgtcaaggctcagctgttttgatttataactctttttgccttctccctgttttatctgaacaagagatatataggttatactagggcactattaacatgacagggactacgaatgatgaaaggctgatgtatgcagcaccatccagttttgtggattcttccttttttgtggaattatcaagactcaaattaaatgttctaaaattagatacttcttatcaacaaatagttggttattataattacaattcactaagtcagaaccaaaatccagctttaaatttacgtgattctagtttaaaatctattagtgatcttacggaagtactaccgaaacactcttattttttatcaaatggtaagttattgaatgtaaactcaattaaagaatttaaaaacttaaacaagaaagatttgttaactgaatcagctatgacaatattcaatggaatcaaggataaatcatttttatctaatcctcaattattatctagctttactatattatcatattgtgatttgaaaaaatactccttctattattggtttgcattcccacaatttcaatccaattggctcaaaattgatatgtcacattctataaattacagatttgatagatcacaaagctttacagaacaattctatattctcaatgaaactgatgatgaactaatacctatttcagaacttcttgactactcttcaactgataaatgtaaaattttatttgttgatacttgctcacttgagtatactgtatcattcatattaagaaatttcctatttgcattatcatactataatttcaaaaatgttgagtttcaagtattgaaagtaaatcatccaagttttaactttacaatcaaccttgaaaatgaagattataattcaggaatttttgataatccatcttacattccgccaatatcaggatgggaaagaactttacgtggtaaattaggaccaaaggttgccgatttaggcgcattgattgatccattacaattatcaaatcaagctattgatttaaatcttcaattgatgaaatggagacttgtaccagaattaaatcttttgagtgtgaaaaattcaaaagtactcatattaggctcaggaactttaggttcctatattggaagatgtttattagcttggggtgttaggaagataacatttgttgataatggtaaagtttcattcagtaaccccgtcagacaaccattgtacaattatgaagactgtttaaacggaggctcgtcaaaggctgaaacagctgcagttaatatgaagaaaatctttccacttgttgatgcaacaggacattcgttacatattcccatgattggacatccaataaaggatgaagaaaaagaattcgatgattataataaacttcttaaactctatgaagaacatgatgcagtatttctatgtttagattcaagagaagcaagatggttgcctactttattaggcaatgcaatggataagatagtcattaattcagcgttaggatttgaaagttatcttgtgatgagacatggatgtattgattccaaaaagggtataaacgagcaagttgatggaaggttgggttgctatttttgtaatgatatagttgctcctaagaattcaatgaccgatagaacattagatcaaatgtgtacagtcacaagacctggtgttgcattaatggcttcctcgttggctactgaattgtttgtttccatattacagacacctaatgggaattattcaaaacatattgtcaatgatagatcaaatatattaggatcattgcctcatcaaataagaggatttttacataattttgaaatactgaaagttagctctgacaacttcaaatactgtactgcgtgctcagttaaggttgttgaagagtttcagaattctggttgggaatttattaaaaaatcattaaatgaagaaacatatcttgaaaatcttacaggtttgaaggctttccatgaaagagctgagaaagcagcttttataatggatgattacgatgatgaatctggactcgaagataatattgattaatctcaacattttttgaagtttcactctttttctttaagtagtatgttacatttattaaagcaaataaaaatgttaatttatattttgtttcagtaattttttaaaacgatatgagaagaactattatgacattaacatttcaacagcccaattaacacttaatgttcttatatctgtatatgtttgtcctgtaccaacaaataaaataggtatacctgttgcaaaaaccatattaaccatagaacctatcaaatcaccaaccgtatcacatttagagataataaagaaatctagatgtctatttgcaccaaaagccttattaaagttttgtgcttgtaaaacagaatcagtccctactaaagcttcaccgaccataataattttatctggattagcagctttagcaaatgatgctaaaggtgccatcaagtgagagtcattatgtcttctacctgcagtatccattaaaacaacatcaaacttattttctttagcataattaattgcacctgttgcaatcttagcaactaaatcagcaccaccatagcctgattcaaataattcaatttgctttttatttggtgataattgaaccaaattattaacatgagtacgtaattgttcaacagcacctgaacggaaagtatcacatgctgcaactaaaactctatagtcattttgtagtaaccaaaatgctaatttggataaattggtggatttaccaacaccgttgacaccaacaacggaaatacagtaagggccttgactgtttgccttcttttcttgaatttcgtgtaataaatcaatagaatgaatccggggtaagtaatttctttaattgtctagctaaagatttctttgcggtttcctcaattgatgtaaaggattcggtagtttgaccaattaaatctttttcaacttctgatattaatgaagtggcaacattaggagaaacattcttttttattaaatgttgaatcattgattgcttgatttcagtaacatcttcctttgtaattttcttaccaccaatatattttttcaaaaatccaaaagcagaggaagtcattgaacttgattgcttttctttttcaattgttttctttttagatgatgagataatcttgttcatttcatcagatagatcattaactagaaatccgtcagtggttttggtaccaaaagttgatttatcaccaagtagttgatttatatttgagcttgtttgctttgaatttgattctgtatttgatgaagagaaatcaagagtagattcatccttgccatcatcctcgtaaaatgtcccatcagtattccattttctggactttttagctttactggaataacttcttgcttgctttacctttattagtagtattagtatctttattgtttgtatttcgattttcatctttttgaactggttctggttgttttgattcacttaatgtagaaatatcacctagtttcaagttgaagaacttttcaaacttatctaaatctgcagaagtattttcgtataaaattttaatatttttaaaaatggatatggatcttttaccgttattaaagatgaatataccattgtgaagaaaactctattctttgatttttcatcagtccatattaaatattttagattgtatccatcaaatgagtaactacctaatgtaacatcagaatcagaatatttcaaaatatcttcattatcctggttttctaattaatgaacgttttttactaccagatttttcatccccatcaaaatccttttcatcgtcatctaattcatcatcttcatcatctaattcctcattatcatcagaaatataatcatctgctgcattggcagctaaattttcagcctctaatgctgcattagcttcgctttctttattagaacctgataagaattcagatccttccacatatttcatttttctttcattaatcaacacgtcattgataaaggaatttaccacacgtgaataatttttacctggttgatggttaaaatgcacagtaccagatggatcaaagatcaaaaactggtcaatcatttttgtctatgtaattaattagctgacttagagagtttgtcgcaagaagaaactaaacgaaaccactatcatccattgaatcagaacagcgatgataaaagaaagtcaacatgattttcagtttcaccaaatttccatttttcaggctgtgcagggtttttattttaatcaaaaaattttaactagtaaaaaaataattttacaacttaaataacagcataattactcttttctggttgtaatattaaggtttacatctcaagtaaagctttattgacaagaaatagctatataatttattttgaataattagaatatttaagaaaaatgtcaacattcaaagacttgggattaccaaaatggttatgtgagactttagcaggtgtcaaaattacaaaaccaactaacattcaagctggaacaataccacagattcttaaaggtaagagttgtattggtggtgctaagacaggttctggtaaaactatttcatttgccgcaccaatgttagctaaatgggcagaagatccatgtggtatttatggtgtcattttaactccaactagagaattagcaatgcaaatagctgaacaatttagtgcgatgggttcaaatgttaatcttaaaacagcccttattattggtggtcaaagtatgattgaacaaagtaacatgttgaaaaataatcctgattttgttattgcaactccaggtagattagcacatataattgaggaacatcctgatgatgtgaaaggcttgaaaagagtgaaatttgtagtattggatgaagctgatagactattaacagaatcatttacggagcatttgggctattgtttgaaatctttacctgatggtaaaaagagacaaaccttacttttcacagctactgttacagatgctgttagatccttgaaggataagaatgaaaatgttttcgtttatgaattggacaaaatagatgatgttttgatccctgaaagattaaatctttcttatattttaactccgtatcttgttaaagaagcaattttacaccatttacttacgattggtgattacaaggaatcaactgttatgatttttgttaatagatcagaaacttgtgaattgataaaaagaattttaaaagatcttaatgtacgagtcacttcattacattcagaaatgccacaatctgagagaaccaattctcttcatagatttagagcaggtgcagctcgtgttttagtttcaacagatttgggtggtagaggtttagatattccatctgttgaattggtaataaattatgatattccaagagatcctgatgatttcattcatagagttggtagaactgctagagctggtagacaaggtgatgcgttatcatttgttactcctaatgatttagatagattattagcaattgaagatagaattggtcgtaagatgaatgaatatgagaaggttactgataatgaaattatcaaagattcattgaaggtaacatttgcagcaaaggttgatgcaagaatggaaatggataaagaaaattttggagaacgtaaacaaaaacttagagagaagatggcaaagagagcaggaaatactgttgcaaatggtaaagtatcaaagataaagcctaaatcaaagtccaaatcgggatccaacaaataatggatagtttctatgttaaaatttttgtataaatacccaattggtaagtaataactaaacatttaatagatagatatacatgcttgaaatgatgtacagttagttgtgattaatatcttgcgaaaagtcaaaatttattttatttaaagtattatgaataactactatacagattagaaaagaactaaaagaaaatttgaaaggcaaagatcatctcaaacaattcttacccatcttttgtctatcaatatgagctctaagaaccttttgtctatcacgtaaactcatctttctcttaccttgaactgcctttttatgaatcatcataacaaaattcttctttctttccttttctctattagtagttgaacgctcattttctctcttaccctttcttgaaccaaatttctctctatcttctctaccttccttaatagatgccattctttcttccttattcatcttacgtctatcaacattaactaaatcagttgaatcaacttcatcttcattacgtaatttatgaccagtgacagtttcaatacctgcttcagcagttaattccttcagtttagcaaaatcagcaggagttaaaacatggtttaaggtttctctaattgcctttaattcttcttccttggctttttccttctctaattgtttctttgattttttggtagttccattaccttcatcatcagataattccaagtcagaatcttcaccatcatctttacttatcttacgtctcttatgttgtttcatatatttcaaatacttcttcttaataccatttctttccttcggtaattcttcatcatcttcatcatcttcatcaaagtttaattcagtatctgatttaatatcaacccaatcaccttcgacttcgtcatcatcttcttcttcattcttcagattctggtaagttccaatcttcttcaccttctttaccaagtaaaccttgttctaatttccacttagctaataattctaaacctggaataccattagtgttatccttttcaataccaaattgtggtaattccttagaaccattatgaattaaattcattgttgcaaccttacctctatcagcctttgctaacatttcaggtgcaacttctctatataatgaaattaaagatcttgcagccatcataacagctttactctttgaacctttataagcaactaaatcttgtaataaatcttcatcaataccagaaggaatttcttgctaaaatttctcttgtagtatttaaaccagcagatgcaacttctgctgcaacaccatcactgacaaattcatcagcaattttacgtaccatcatattaattgattctggtgggactaaatcatgagtggcttgagctgcagctgctaaaatttgtgtaacatttctttgttttggtgttaaatatttcaaaaaaaatgaatataaacctaaaacagttaatttatgtgtaccaactaatcttgagactaaattcataattgcaattctttcatctaaatcgaatttgtttgcatttttaccagacaaatgactttcaaacatttcctccgcaaattgttgtggatctcttaaaagatgaatagcactgaaatttaagtaagttgcagaatgttttgaagaatttttctttttcaaagttttaatagcagattctaattttttacttctctttgaatttttcttattaacttgcattttatgtcttagagcatcaggatcaatatcttcatcatcagaattttcttcaaatgctgcatctctttccttatcagcacctaagaagaatttaacaccagaaacaacgactttattgtcaggatgtaaacaagcttgagtcattaactcaacagttcttgaatcatcccaaatacctcttctccataattctcttgtaagtttagttgcccatataccattaccatccttttgatctaaaagattgaataataaagcttgagttgttctatttaatttttgattctttgcaccagtattacatgatttaagtaatgaaactaaagcggtataaatttgttttcttaaagattttgaatgatattcagaaccatttgcaacatttgaagtatatgaaaataataatgggaaaagagttttaattaatgattcagcggtaatgatttctttatttctaagcataactagacattgaacaattttttctcttagttcatgatcaagttctgcatgatttttagttaaaatagttgctaattcatctgggaattttgcagtttcctttggatatgatgaacagacaaagacatgaaattgatgacttctgcaaattcttcactgtcttcagttgatggatttaacaagaaaatatctctcattgattcatagtgtgaatattgttgtaaaaattcttcatgataagattctggatctcttctaaccaaattttgtaataatgcaaaattggttggtaagattgctgctcttcttctcttaaccattttttagtatactgatagattgatttagcagttaaactgtgattaaaataaagaacctcaatgatatattgaatatcgataatgcaatagattactttaagaaaataaatttttttacctgtaaagtgaaaaagtgaaaaaaaaatttcctctcagaaaaaaaaagaaagctctttgtggcgcggtacttgtaaagtgtgtggcgcatggtgttgacattttaaatgaatttgcacctttttccaatacaataggtaaaacacgaaataatgttatttcaaattctttagagataccatttccttttgggtttttcagttaaactggggactgtatttcattatgtctaaagtgtatgagataagcttaaatgaatccaatcttggacagtttgtgtttgggaatttcactcataaaacatacctctcaagcaatgttaataacaataataaaataaaggcatttaaggatatatcttcaacaaaggaaaaagaagacgcattagttgatgatttgttgaatgttctagatacaagagaaggtaaatacattaaatttgggcgaggcttggatttgaatgatacacagacgtgtttaaacggtatagactttgaaattgatgttgatgttgatatttattacaaagaaatagcaactcaaattgcattattatctaaaaaaatatcttcacttgcctatttttaccgatattttaataaatcatgttatggcagtgtattgagtaagttatgtgagtatataaggaagtttttgaatcaacacagattgatgctatgtcaattacgtgaatcaaaaatttcacttattatgctatctcaacgaataaataatcatccctttgatgatagctatggaactccttttcaatgtataacacatctctatgatctaacccgtcatatagttaatgaaaattataaaaggttacaagagtcaaatagaatagacatgcaattcgaaaatattatgaactctttaaaagaggatttaaactctaaattattaaatgatattgttatagattccacaaattcaaaatatattaatggtgggatcgttctaaatttcctacattttgaaatacagcaatatagaggtaatgaaaagtcaacacgatttctaaaagatttataccatctcattagtactgactatttgacaattttaaatgattggctaagatatgggaaaatttttgatgaattcgatgaattttttatatcagaagagaagaatcatactgatatctataatgcttattattggatcaataaatttgcaataaagagggaatcgttactttcacaattcaaatcaggtgagtttcagaaaaaaatattcctaacaggtaaatacttagcaattcttaatgaatgtgaatgctctaatttagtaagaatttatccctatgaaaatatagtttcactaaatagtataactttagaatcacaaattgataaagcatataaaagatccaatgaattatttgttggagttttcttgaacaattatcaacttcctaggatttttgcatcaactaaataagtattttcttctgacagatgccagctattttaataacttcctaaatttatctaaccatgatctcaaaagaagtttcaatgcaaagttgatgcccgaaatcaaaaaaaaatatcttctctcctataaaagtgaaagtaatgatataacggatacaattatatcacaattactcaatgttaaatttgaaactaaaccaattttagatgatatattagaaatcgttaaaacacatgcagccgactcaaataaaattttaaatgcttcaaatctaggatcattaactgaattattagaagagaatgctaaaatgaactctaatatgatatcctcaaatgaatcagaattaaaaagatgcaatagactgacagttagccattttaatatagaacttgagataccttttccactaaatcaattaatcatagactctcaaaagctggaatatcaattgatcttcagacattctacgcttctgaaatttttagaaaaaagatttgaaaaatcttggagagaaattggttatcatacattctggacatggggatttgaggatagaaaagtctcaaaatggataagaaaatgtagatactctcattccaaaatgtttgattttttgaaaatatattcctatcatttaaaagaagatgttttagaaattaattgggcaaatgttgaatcaacattaaagggaggacttgagaataacgaaaaatttgattttattgatttcaagtctcaacttacagaatttttgagctcttcattaagtgatatgttattatcacaaatcaatgttgctaattgtttgtatgaaatattcagtttaattttgatgtttcacgaatatgttttatcattaagaaaaaatttactgctgattgatgaaggtttgttagatttacatagagaaagactgaatttatcattcagttatagtcatgatgataaagaaaaaagatttggagacatgactcaaattttactatcttatgatgaaatgtttagtcataaattacgtgaattatgtggatatttaagttattatggagaaatcgattctcctaaaatgttactgcttcataataaattagtttcatcctttaatatccaatcataaatatatttttataaatttctatatacatacatcaccaaatagtatttggatcgctgttcattagtaatgtttttcattaaatcttatcatatctaccagaacattccgccattaaatctatcactgtctcgatattttccttattcatacctgaacatggaacacatttccagttcttagcatctacaaaagatcttaattctataaacttttgttgtgaattctctaaatctgcctttgtagcaacaactaaaacatttttacctgataatctttcctctcctaattcatcaattaaaacattcatatcatcaattggattttctgatccaagagaaacaacaaatacaagaccacctgatctttcaatatgacgtaaaaagtttaatcccatacctttattgtattttgcatctttaacaatacctgggatatctgcaactgtaaatggtggttgatctatacgtaattgaatagtaccaatcgttggttgtaaagttgtaaatttccagtgtccaactctaggtcttgcattagagattgctcttaataaagtagatttaccagcatttggtaaaccaactaaacctaaatcagctaaaagttttaattcaaaaataaaattttcttcaatacctgctctaccttgctttgcaaatcttggatttctgatagttgtcgtttggaaatgcatgttacccattccaccatgaccaccttttaataataatattggttcttcagttggtttgtctaaatctaaaccatcaatagggaaggtatcattagttaattcatcctctctcttttgaagatcataatttgtaactctttcatttaattcattaaaataatctctctcaagatgataagcttcatttttttccttaaatatccaacctctaccagcttcataagattttctgaaaaactgaatgaattttggtaatatagatccaaattcatctgattttgccttaacatggaaaactttgtcatcatattcattcttctgtaactctcgaatatcttttggatcaggacaccattttatatgtgtaccaacaggaacattaatgtaaatactatcaccctttttaccatctaattgtccgtttctaccatttgatccatcaggtgcaatataccgtgatctaagattatgtaatgaacttattccttcaactgcctatgacatatatatcaccaccatcaccaccatcaccaccatcaggtggaccagatgagatacctgtatctctgaaaaaggagacatcaccattacctccagcacctgcttttaatttaacgactcttaaatctgagaatgcttgtatggattctgccttcggtcttttctttgcattcaatgaagaaaatggagatgatgagacaaaatagtcggatgcaggaatagaaactgtatgatatgttttttcattttcaattgttggtgattcaacaactgtatgaattcttttagtcttttttgatttaaatttcacaaaattttcattttttatttcatcttcaagatcggacttatcaacaatttcatatgtaacttctgcttcttctttaacttctattttagttttctgcttttctaaactttccaaccatgtattattttcttgcacggtaggtgcattatcaggaactggaggaatagtggaatatttaaatgagatacattgatttgatgatctaaaattttccgacataaaattctatttatcgttctatactgtagcatgctcgactgttgtattggatatttggatatctgttagtccttgatagaaaataaagttgaaaagtttaggtttctttttatttctaatgaaattttatgaacaacaaaaaaaatgttgtagtgaaaaattcacaattcatgttgtacaacaaaaagcgtgtcacatgaatataaacataattataaaaaacagtgcttttataggactttgaaaagtataacatagctttcaaagcctaattcagtaaagaagcatctcttaaatgaacactattaccttttctaagaaatcaaacaaaagaatggtgaattaaaagcaaaaaacaaaaatgacgagccacctaaaaagtaaaaaatgccaatttcagaagttttacatgttggtttaagatttacagtcaaataaagttttatgagacacctcactaattttgataatatgagataaagtaagacaattagaatattttaaaagcaaagttagagtttagagtaaatttatataaattcttactatattagttacaaaggtattaattattttttgtaagttgaaagatattcttcataaccttcagattcaagtttttcagctttacctaaaacttcatcttccattgaattcatatatttttccatttcagtaatccatttaaaatcaaatgcacctaatattctaattgctaataaagcagcatttgtagcattattaattgcaacagttgcaacagggtatacctcttggcatttgaacaattgaatgtaatgaatcaacaccatctaatgttgaacctttaacagggacaccaataacaggtaatggagtcattgcagcaaccataccaggtaaatgagctgcaccacctgcacctgcaattatacattttaaacctctctttggagcatcaattgcatatttagccattctttgaggagttctatgagctgaaacaattgtaacttcaaatgggacaccaaattttttcaaaatattacaacctgctgacataacaggtaaatcagaatctgaacccattataacaccaactaatggagtttttgaagtacctggaattaatgattcatcctctttattttcaatttcagtattttgaccttcaataaatgcaagtctacgttcacaatcattcattgaacctgagacaatatttatatgacccatttttctatttggtctagttgatttaccatataaataaactgaagcattcggtatatttaaagctcttttacataattcaatttcaccatttggttcatcaaaacctaaaacattaagcatgatagaattagtttgaggagttgagaaacaagtaaaattctttggcattggtaaaccagtgattgatcttatatgagcttcaaattgggatgtaacacatgcatcaattgtataatgacctgaattatgaggtcttggagcaatttcattaactaaaagttcaccatttggtaataagaacatttcaacaccaaatataccagcacctgaaaatgttgaaactgcctttttagctaaaatttgtgccttttcttggattgtatcattaactctagcaggagcgtaaacagtatgacaaatattatttctatgtatagtttcaacagttggataagagtaaacttcattttctggatttctaacaaccataactgcaagttcttttacaaatggagcccatttttcagcatataaaggtctatcagctaaaacttttaaagcttcagggataaatgatttatccttaacaacataattacctctaccatcatatgctaaagttttagatttaagcatgaaagggtaaccaaattttgaaccaatatcctctaatgctaattcagtactttcaacacttaaagattcagcaactgcaacattataatcaattaaatgttccttttgacgatatttatccttaataatttctaaagtttcaggagatggataaattttaataccagtttccttttgaattaattttaaagcatcagtatcaacatgttcaatttcaactgttaaaatatcacatttatttgctaattttctaatatcatctatattattaaatgaaccatctaaatgttcaccatttgcattaatttgctttgcaggagatgaatcaccagattcaaggataacagttttaatatttaatctacttgcagcttcaacaagcatacggcctaattgaccaccaccaagaataccaattgtttgagagtccattttttgtcagtttctgttgtgttcagatagaactaatataattagagaaaatgtctgattaatggtgtatattaatatattccagtaatagaaattcatgttaaagatatataataatatttctaggataacttttttgattaagtaaaaattgactctggcctgtattatctaatcaataataataataataacaaaaataattataatgataatgattagataagcaatgcgcattacgtaattatgtcatagctaaaatgatgacataaccataattcggatgatgaggataagtgagaagtctatatagtactttgaagaagataactaataacaccactgtattgatgaattaacgatttccagcattatcgtactataaaattgaaaacatttcaatccgctccctttgctcaacaaagaagattgaatatatagtatacgaaaccaaaagaattcaaagcagtataatagaacttccgttaaagttgaaagttactacgagaacattctaaagtcaattttattccaatagatgagccacccaaaaacaaacaaacaaacaaataagcaaataaacaaatcattattaaagctttgtttaaaccgtgtctatagttgcaaatttattattataaaattactgatgacttaatgtgggaatgtttaaagccgcgatttgaaatactaagtctgggtgatcggcccggagataatgttaattcccgtaagttagtgggacaagatctattattttattcaattaaggtttagatcttcataatcaccatgttttatgaccccatcaaattttgttcctcttcttttcttttctttaccattaatcctcttatttcgtatatagtttttttgggcttattctcaagtcttgagggattaattagcgggaattttgttaaaccgtttgtaaagtgacactcagttttttatttgagtaaaaataactaaattctacctaaacactaacgagttacaataaacaaataaaaactatttacactgattcttatatattttgtaaataattttattaccttatttacgattaacattgtttgacattctgaactataaattacactatttaacaatacaataactataacaaataccagtatatacctcatcaagctcaaattaatgagctaaacttagaggactaaaatgttcccgatttcagattttcttagaaattgttaaaaaactgcacccaaattaatgcgcccaaaaatgcattaaaatttgtaaaagaattatttattcaaggtgcatgcatttttttaatgtttttcgttacttatcttttatcattttttaaactttctctgtcctttcccctttcttattattggtctttaattttgtgtctcctaatcttgaagtgttagttgctatgaactcccatatttacttagtttttgttagtcctctttttaggatttgaaaaaaagttggggacctgaactaccgagatttttctcgtgaataagtattttcattactttcttactaatatctaaatcttggatgttattcctattattaaactttaaatctgagttgaaatcattagaaaagtttatttttagtgaagaaattatagttgattatgtatcatctttagacaattggctttagctttttaatctaattgtgtttacactttttacttattctaactaaaaaatgacggaaactatcaaataatcgaacaattttaaactttgaaatggatatttttattggattgtaaacaattgaaacatattctaaaagtgtaaacatttgtattctattaaattgttatacttcagatgtttaaaagcagaccatttccctctgttacatctatgactctttttcactgcaattattctacttatctattttttggttaaatttaaaattattttatttaagacaaaaaacctattcgcttttatacaatgcagttgaatataataaattcacttacattgttgctttcttttgcaacttcatcacttgctagtagaaatacttatggtttatcaactaatggtgttggttgtactgcacaaattgcaacttcatcagttggttttaatgctaatttttacaattatgttggaggtgatttaattgatttcaataataaaaactttgttgcaaatgattatacaactagaaatatttacgcctctgctacaggtgttactgaaccaaattttgatcttgctaataatcaagtttataatgctacaatttatggcttacctggtgttagtatttatagtactgttcttgaattaaaaggttattttacaggtatgtatttccaatttttaaaacttcaacaagatatttaaaaaaaaagaattatcaaatactaacatttttatttttacttttatgatttatattatagctcctgaaaccggtctttataaaatttcagttaatgatcttaatgatggtgcatggttttggttaggatcaaattatgcttttgattgttgttctcaaggttcaatcggtgattcttccaatgacgttcttttaggtgtcagagataacggtagttttggctcttacatctatctcgaaaaaggtaacatgtatccaatgagagtcgttttcatcaacatttattttgctgctaaattggaatttgaaattattactccaagtggtgtaatcattgacaattttgaagattatatttctaattttgaaacaagcgatgtttccgattgtacatcaattaatgcaattaacccagacattgtttcaacatcagtcacaattagacctggtttagtaaacgattttactgattatacaagaaccaccattttaaatgatgatgatggtgttttgcaaccaaccacttatattgttgaagaacttttatttaatagagctgactatattagaactattactacatctggtgaccaagcatctgtttacactgttacaacatttacatctaacgataatggtcttgctggtgttcttcaagttgttgttcaaaccgctgctactccagcttcaaaccagccaagtggatcagccaccagtacacattcaattgttactttaccaacaaataatattgccggttcaggttgtcattttgcaaataacttttatactgaaaaccagggttttagtgctaaaatttactcatatgatgctgatgcaattcaattagcaaatacaaaatactatgctaacagttatactacaaactctcttattaccaccgacactggtattacaagacctaatttctctgtgcatgctatcgcttttcaaactgaaactatttacggtcttccaatttacaacacttggaacggttttgttttagaacttactggttattttgttgctccagaaagtggtatttatgaatttgatattgatcaagccgacgatggtgcaatgttttggattggtaatgctaatgctttttcatgttgtacacaaggtgaattcccattcaattcagatgatggattccttttatttaataatggtgatgaaagtaggggttatgcaaccttagaaaaaggtgtttattatccagttaggcttgttctaattaactggtatggtgactcaatgttaaatatgaatttcaaattaccaagcggtacagcaatgctacaaaattggtcagattatgtcgtttcagtttctgatgtgcaagatggtgcatgtcttccaagtgatcaagatttcttttctacccaaattttgagcgttgatacatctctcactagtgatactacacaatggattgatacaacaactgttgagaatggcgtgaaaacaaacgaatttattgaatccgtcggttatccagccccatcttctactactgttcaagttaacacatactcgggaacaattacatctaccagtacatcatacagtttctatagtgacgctacaactacaacaccaattgaatacgattatgtttacgtaccaagtccaaaatcattaactccatctcacacatatgcttatgaaggttcatctactactacatcatccttagtctacaccaccaccgatgctaatggcaatactatcaccaccactgatgttgcagttcttgttccagaaaccaccagtggtgtttggaccggctcatctgctactaccaaggttattgtcaccagtgccgtcgatgcctcaggcagaccagttgaaaccacatacaccgaggttgattatccagcaacaacatcaacatcagcatcaacatgcatcaacatcagcatcaacatcagcatcagcagaaaccccatctcacacctatgcatacgaaggttccaccacactcacttcatccttagtttacacaaccactgatgctaatggcaacactatcaccaccaccgatgttgcagttcttgttccagaaaccaccagtggtgtttggaccggctcatctgctactaccaaggttattgtcaccagtgccgtcgatgcctcaggcagaccagttgaaaccacatacaccgaggttgattatccagcaacaacatcaacatcagcatcaacatcagcatcaacatcagcatcaacatcagcatcagcagaaaccccatctcacacctatgcatacgaaggttccaccacactcacttcatccttagtttacacaaccactgatgctaatggcaacactatcaccaccaccgatgttgcagttcttgttccagaaaccaccagtggtgtttggaccggctcatctgctactaccaaggttattgtcaccagtgccgtcgatgcctcaggcagaccagttgaaaccacatacaccgaggttgattatccagcaacaacatcaacatcagcatcagcatcagcatcagcagaaaccccatctcacacatatgcttacgaaggttccaccacactcacttcatccttagtttacacaaccactgatgctaatggcaacactatcaccaccaccgatgttgcagttcttgttccagaaaccaccagtggtgtttggaccggctcatctgctactaccaaggttattgtcaccagtgccgtcgatgcctcaggcagaccagttgaaaccacatacaccgaggttgattatccagcaacaacatcaacatcagcatcaacatcagcatcaacatcagcatcagcagaaactccatctcacacctatgcatacgaaggttccaccacactcacttcatccttagtttacacaaccactgatgctaatggcaacactatcaccaccaccgatgttgcagttcttgttccagaaaccaccagtggtgtttggaccggttcctctgctactaccaaggttattgtcaccagtgccgtcgatgcctcaggcagaccagttgaaaccacatacaccgaggttgattatccagcaacaacatcaacatcagcatcagcatcagcatcagcagaaaccccatctcacacctatgcatacgaaggttccaccacactcacttcatccttagtttacacaaccactgatgctaatggcaacactatcaccaccaccgatgttgcagttcttgttccagaaaccaccagtggtgtttggaccggctcatctgctactaccaaggttattgtcaccagtgccgtcgatgcctcaggcagaccagttgaaaccacatacaccgaagtcgatattccagcaacaacaaccccatctcacacatatgcttacgaaggttccaccacactcacttcatccttagtttacacaaccactgatgctaatggcaacactatcaccaccaccgatgttgcagttcttgttccagaaaccaccagtggtgtttggaccggttcctctgctactaccaaggttattgtcaccagtgccgtcgatgcctcaggcagaccagttgaaaccacatacaccgaagtcgatattccagcaacagcaaccccatctcacacatatgcttacgaaggttccaccacactcacttcatccttagtttacacaaccactgatgctaatggcaacactatcaccaccaccgatgttgcagttcttgttccagaaaccaccagtggtgtttggaccggttcctctgctactaccaaggttattgtcaccagtgccgtcgatgcctcaggcagaccagttgaaaccacatacaccgaagtcgatattccagcaacagcaaccccatctcacacatatgcttacgaaggttccaccacactcacttcatccttagtttacacaaccactgatgctaatggcaacactatcaccaccaccgatgttgcagttcttgttccagaaaccaccagtggtgtttggaccggttcctctgctactaccaaggttattgtcaccagtgccgtcgatgcctcaggcagaccagttgaaaccacatacaccgaagtcgatattccagcaacagcaaccccatctcacacatatgcttacgaaggttccaccacactcacttcatccttagtttacacaaccactgatgctaatggcaacactatcaccaccaccgatgttgcagttcttgttccagaaaccaccagtggtgtttggaccggttcctctgctactaccaaggttattgtcaccagtgccgtcgatgcctcaggcagaccagttgaaaccacatacaccgaagtcgatattccagcaacagcaaccccatctcacacatatgcttacgaaggttccaccacactcacttcatccttagtttacacaaccactgatgctaatggcaacactatcaccaccaccgatgttgcagttcttgttccagaaaccaccagtggtgtttggaccggttcctctgctactaccaaggttattgtcaccagtgccgtcgatgcctcaggcagaccagttgaaaccacatacaccgaagtcgatattccagcaacagcaaccccatctcacacatatgcttacgaaggttccaccacactcacttcatccttagtttacacaaccactgatgctaatggcaacactatcaccaccaccgatgttgcagttcttgttccagaaaccaccagtggtgtttggaccggttcctctgctactaccaaggttattgtcaccagtgccgtcgatgcctcaggcagaccagttgaaaccacatacaccgaagtcgatattccagcaacagcaaccccatctcacacatatgcttacgaaggttccaccacactcacttcatccttagtttacacaaccactgatgctaatggcaacactatcaccaccaccgatgttgcagttcttgttccagaaaccaccagtggtgtttggaccggttcctctgctactaccaaggttattgtcaccagtgccgtcgatgcctcaggcagaccagttgaaaccacatacaccgaagtcgatattccagcaacagcaaccccatctcacacatatgcttacgaaggttccaccacactcacttcatccttagtttacacaaccactgatgctaatggtaacactatcaccaccaccgatgttgcagttcttgttccagaaaccaccagtggtgtttggaccggcttcctctgctactaccaaggttattgtcaccagtgccgtcgatgcctcaggcagaccagttgaaaccacatacaccgaagtcgatattccagcaacagcaaccccatctcacacctatgcattacgaaggttccaccacactcacttcatccttagtttacacaaccactgatgctaatggtaactactatcactaccaccgatgttgcagttcttgttccggttgattctactattacttggactggttcagttaccacaactgaagttatcacaacatgcgcagttaatgctgaaggtaagccatatactactgttcttactgttgttgaagttcctgcatgtcaaacatccacctcaacctggtccaactcatactcatccaccggtgtcactactatcagtgatgtagttacaactgttgtttatgttccatgtcaaacatccacctcaacctggtccaactcatactcatccaccggtgtcactactatcagtgatgtagttacaactgttgtttatgttccatgtcaaacatccacctcaacctggtccaactcatattcatccaccggtgtcactactatcaatgatgtagttacaactgttgtttatgttccatgtcaaacatctacctctacttggtctaagaactattcatctactgccgttactaccattaatggtaatgtttcaactgtcgtctacgttccatccaccaccacattaaccaatgcccaaattacttccaatgttactgcatctgaagcaacgatcactaaacctgttgcaagttcattaacaaccaaggttactggtcaaaatggtattgtttcatccacatctgtttccctatcatcatccattgagatctcaagttatgaaggttcaggagctaagttaaccggatcttttggatttatcctctttgcttttgcattagtcatctgatgatttaagtttattatttttcgtagtaactttatgttacgttcacgtgttcatataatttcatttgaaacactgtatttactttataaattactcccccatgtgataccttttttaggagttgataatttcatcaattttgtagattattaattataactttctataaatgatatatagtttaatctaatttttagcaattgttcacttcacacagctcatggattgataattttgttcctaatattttccataacgcgtgcaatgaaaaatttgattggtggagctgcacttttttttaaattagaacctatataagatgcacatgaagagaaacaattgatatagatgatgaatgtcttcttttcttctaatgtttttcatagctgtgcagagttagcactagactcagctcaatagctttatgtataacaaggtttataatatcaagctttaaatacagaaacgatgcatattcaggatttagtttttatcctctatttcattaatcttcctgttgttgaacagagagtcatgactggtaatggtaccgataatgtgtatattaagctactactaagaaataaaaacaagtacaggagaagatacaggagataggtttattacaagcttgctaatagaattcataatcattagaacaaaagaactaaattaggaaatataattaaataaagtaaaatatcgttttgtaccttcagctgttacttactagcatgaaactgcgctttttgattttttatcaaaagccttagcagcataaccaacacttgtcttgaaataacctgtaatatagtaactaaacttctaaaataatttctgaaaaagtttttaattgatctagaaaatgataagtactgtaaatgacggtgttgagcatagaaaattgattcaacattccatttacaaaattttgcatctatatcaataattgaaatatactcaactaaacatttatctatattcaacgttttataggtaacagtcatctaaaagttgatcataatgatgtaaaattaaattacatctctctctatgtttagcaataaatactggattatttggaagaccaataattggataaattcttgtttcaattaaaaaatcatagtaaaaatttattaaagttgaaaaaactcttgatgaaatatcaaataataaaagtaataatgctatgactaatgataaatgtaaaaatttgtataacgatggatgtgcatttataaaaattttcaattctttaaagaatgggtaagatgtatttgatctacttgatctacttgatctacttgacttgcttgatttacttgatttatcaaatcttctggattcacttgatttatcagatcttcttgatttagctttagtaggtttttgagttggctgttgataggtactttcatagtcagtttcaaattcagatgtataagaatcagcttcataatcagtttcaactccagatgtataagcatcagtttcaaaatcagtttcaactccagatgtgtaagcatcagtttcaaaatcagtttcgactccagatgtataattatcagcttcatagtcagtatctacagttgaagtataattatccgtaataaagtcagtttcttcatctgaggtttgattatctgaggtaatatcagtttcaatcccggaagtataagcatcagtagtataaacagtagttttattgatattttcctctttcttattcatagatttatctttagttttattagcagtatcttgtttagctttattaatttccaattgatcaattatattccattctttaggacctgaacttttacttgattgtcttgagttgtgagtattagttctagccatttgttaaatgattgaattgaatacagaaagcaatctctacttcagatttaaataaagaaaattaaattatcgcttatataataaatgagatgaataattaaatgaaacaatcttattatattgccattggattcctttagtaaaagtaaacaataatataactaaaacagctatgtacttaagttaataaatttctcattattatatgaacttagaatttatattaactcgaaatgttcttcaataaaaataacgtacacatgctatatagtacttcgcattaaattagggcaaattcactggtatattcaattttgatcttgatatctgctgagccgccagattaagtggatatttgctataatcttaatttaatgctcagctcattatcatattgtgccacttatcttgatattatctctttttggtaaagtaaatttctgggtgtaattgattataacatgagatcatcagctattcattcatttacattaacattgtttttcacaacttcaatatttgcatctgatgatttagatgatccaactgctacattaaaattatcatctccaatttcaccagaagatattcaaataaaacctcatcttggagtttttgatagttgtgcagttactggtcttcctatagttggtagagctggttttgatgctgtattatatactgatgctattactgatatgaattatgcaagtggttatgaaacttttacaccagttgctacagtaacatcagttacaaatcctgcaatttcatttacaactggaacaaatcaaactccaaatatttatggttatccacttgatgtttcaaatggttttacagttgttcttaccggttatttattagcaccacaactaggtttatatcctctcagtttaacaggtattaatggaggtgccgtgatctggataggggatggtgaagcttttgattgttgtgctaataattatattcctgaaacttcagattcaacatatattcttagccacagattacttattgatccaattgcatccgttgcttccttagtggcaggtagatactatccatttagaatggtttatagtaacacttatgaaaattcaaatcttgactttgtcttaggtttgcctgatttaaccccagtaagagatttctctaactatgttattacaattacaagacttaacggagtcaattgtatatctgatgaggatgatgaatcatcaagttcaagctcagaaacatcaagatcagaaacatccactttaccaacatcaagcttgacatctagatcagaaacctctaattcagaaacatcaagttctgaaacctctagttcaagtagctctagttcagaaaaatccactttaccaacatcaagcttgacatctagatcagaaacctctaattcagaaacatctagatcagaaacctctaattcagaaacatcaagttctgaaacttctagttcaagtagctctagttcagaaacatccaccttaccaacatctagcttgacatctagttcagaaacctatagttcaagtagctctagttccgaaacttccacctcgccaacatctagcttaacttctagctcagaaacatctagctcaaatacctctagcttaaatacttctagctcacatatatctagctcaaatatctctagctcaaatacatctagctcaaatacctatagctcaactacctctagttcagaaacatctagttcagaaacatctagttcagaagcatcaagttcagaaatctctagttccgaaacctctagttcagaaacatctttagaagcgtcaagttcagaagcctccactttaccaacaactagcttaacatccagtacaacatccagtacaactacctctaacacgacctccacatcaacagtttcaagttcagcaagttctaaaacatcaactaccagatctagaaacgctgcatcttcagaatttgtcctttctaataattacttttatttcattgaacttctcatctttgaaatggccatgatttaaaatctagtttgcattattatgaatttttcctctaaataacttcaggtttcaactttgctttaaaagatagttttctttgcaagtctggctatataataacttgctgatctattctaaaatctgtgtatttttataatcaaaatataaatgtaacattaaaaatttagtgtttaagaaattattcctttttttaacaaaccgaacacagtttaattgattttgcgcatagttcctaatcaggaaattctctcttttcaactctggcattagcgggaccttgttggtagaatttgttctgcatattttattagtgatggtaagcaatgtgttagaatgttcaatgaggtataaggaataagataaagtgaaataatttaacataaaccaataaaaacaaagaaattagttcatcaaagaaattagtttatcagagaaattcgtttatcaaagaaatggaagctaagccaaaaaataaatcaaagtattattcaagaagaggttgcattaattgtaagcgtgctcatgtaaaatgtgatgaaaagaacccaatttgtggaagatgtcttaaaaggaaaacccagtgtgaatatgcaatggattttcaagtaacgagtgcaaatgaactaaacaataatttcaaaataaataaaaaatcaaaacctaaaagttcagtctttcaaatcatcaatgaaacagaaaagatatcctctactccgatgaaaagtacagaaaatttgttcaatatttcaataatgaataaaaaaactgaagctgatggacaagtggattctgatagtaaaatatccactatgtcattaaataaggtattggggagtcgatattatatgaaattaaaaaattcatcagcatccgaagcaagtgatcacggaagtcagtattcattttcaaatataaatattaatgacttaatttctattaaacaaaatgatctaatttatcaaaacttcacaaatggtgggaatgaacttgctttttcctttcataatgaggcgtttcaaccaaatctacacatgtttcatatcccatgggatggtggcccgctggtatatttcaaagataccattgaacaacatgatccaatgctctttaatgaaaacactccattcaatggtcaaaatatgattgattttgtatggacaatgactcgaataacaaaaatattttactcttttgtacttttttctgaaacttcactactcttcatcttggaacttttttttaaattgggtactaaaagtccaatttttcacaatattatgacttatcattgtgctttacacgttataaaggtttacacagaagttggacatttgaaagccgccaatatttgggatcaaaaagtaagaatcccagcatttagaaaatgtattgaaaatataaaggaaggtttagaaaaagatccaaccttctcaaatactgtcattctaacatttgctgttttgtccattttttcaggaaatgtttctgatcgaagctggagtacccatttgaatggaagtcatcaattgattaacaaatgtttaagcttaagtaaagacgcaagagatgatgatccttttgataatgtagccttgaatttgcttgatgtgataattgaatggtatgaacatattaaccactctgctgctttaacatcgttgaatggattctggaataaaaagctgaaacttaaatcaatttataaagagagaggtttcagaaaaaatgctgcaatagctgataataacatgaatctaatgtcaggtcattgtttagagcttagtactataatttcagatatttatgatttcatgtttgttttggaacaaaataacgtcagattatccggactcaactttgtttattttctattaaacccaaatgatcaacagataattaaaacgattcagacatttgggaatgaaatactgaagcatataaattatcttataagagaatatgaatatattagattggatttggaagatgttagaatggacttgtctgtgagatattgtaacatgctgtacatgtatggagtgaagttatatgttacatttttctttgttggtgaaaaggatacatcaataataaaacctttgttaagagatatcattgatttgatttactcaatgccttatagatcatcatgtgctagaatttgtcattggtgtatttatacatcggcattggtttctttaatgattgaagactataatttgtacgggcactttttagggatgctgaaagtttttcaattgaatggtatggagataccttctttcaacttacttgaaaagatcaaagttattcttatagaaaaggaacattggaaactactcctacctgaaaatgatatcgtaatatactagatagctactaaattttattttattaaaagttataacataatacaagtctgaaaacggctaaattttatacatgagtccatttatgtcttgattaattttcatcgtcactggattcttcttcatcactggattcttcttgtaagacttcaatccatttattaaccttttctctaatttcaggcatttcttgtgcctctttagaattccaccaagcaacaatattctcatcatcaagaatatcaatatcatatagcaccacagctatacaaccaaataaaagtgctttataattttcatctaatttatgacagatagtttgtattattaataataaatcaatttgatcatcatcatcaaaaacttgtctctcaaacatcttaccccatttacggaaaattttctctgctgcatctttagtacccaaagtagcagtgttgataaaatgattgactcttttaatcatagccagacaggaagcttcacgaacttcgtgatatgtaacattcatactcatacgtaaagtatttaattctaacattgctgtatctaaatcatggttattttccatagcacgttcaactgttgcaattgcttcttcttcaaaattttcagtttcatcttcagagataaatccacttgcagatgaatgtgttcttcttttctttttatttgaatgatgaacagtaatcgaactggatgctatagatgaatcggataaatgtaatttttccatttcataaactatccctgaagaagtttcagcagtttcgaattgattttcttcataaaggaaaccaacaccattgataccgacaacatcaggatcacataccagagaattttcattatctttaaaattgttgtcatcatcgaaactatcatctgatgaaatattagcactagaagtaaagtcattaattggagttttgataattttcatgttgtttccaacaataacagaattatcaatgacaacaccaaaaccaatgactgacccaggacttaagataacatcttttctgattaatgcatcattggcaacaatagagtgttttataatacaattatcttcaatcactgcaccatcccaaatataagaattttcaataacaacatttgaaccgatcttacatgatctaccaatgactgaattttgaatttctgttctatcaccaataaatgagtctttaccaattacaacaccagattgtaatttacatgactgagacaaaatgacgttattttctttataaatatgttgagaaccgtaggtgtatgtttgatcaagtaacaaattcctttcaggaacgataggataacaccatctttcaagaacatcttgagaaataccatcatatgtttgccaactttcaacccttgcagaatattgatccttagttatgtaagaataaatatgtttttttaataaatcactactcaaaacacctttcacaaaatcagatcttaaagtttgataatcaaaattttcttgaaaaatagttggaacagttgctgtacaaatatcaacatgacaatctatgagattattattaatttcgaattcttgaatatcttctaaaacttctggatctatattgactgatgactttttcccattaattggaggtaaatcttgataatataaacatctattggttgccttatccataataaagcaagcaggttcaataatagatcttgaacgatgcattggtgatgcttgcgttaaaaccattgtacaaatataatcacgatcactttgtttataaactttatggtcttccaagacttttgaaatatctaaattagtaacaacatcaccagagacaagaataaaatctcctgtaattaaacctcttgaatccacatctctcatagcatcaccaacagatcttgattcctttgatgcaatagtttgaatttttttaaaaggagatgaaacgttggtccatttagaattgtcaatatattcttgaatttgatcagaatgtgagcaacacataatataaacttcatttataacatttgcttgagctaaaaattcaagggtatactcaattaatgggacattagccaatggaagtaaacatcttggtttaacagatgtcaagggcatgaatctagtttggaaagaatcagccaggacaatagcttgcattttctggtcatcctctccagcatctttgttattattcttaggtggcatcctgttaatgcttactcaacgtttcctatcaaacgatcaatcaatatagaagatcactgtaactctacacacatgtgcatttcaataatttaatataattactcagaatccattctcatggcacagtctgaaaaataaaatttttcaatgcttagtgcggcgacgaaactttttgtcggtttttaatagtaatcctcgcgtaaatatactattgtagtacacttgaccatgaataataataaacaccattttgatattattatccacgatacagcagtcaagtaccaagtgttgtacttaatatgaacgtagttctaagaactgtttatacgtaccgttctgtatcttatgtaataacctctataacaatcggggtgatagatagtaagacttagtttgtgattaacttcgttatagaaggaggaactacaaagtatataaaataattagtataaagtcgacgttaatgtcgagaaaacttttcacctgctaatgatatttatcatatagcgacacaccctcttgattctgcctatcttgattgaattaaaagatagctggaatcaattcattaataacttttactgtaactggtttagttaaaatatcagctaattgtttatctcctgaaatatgatctattttgaatctaatattaccatcactaaatggatcatgtggatctggctttgtcagtctttctttaacggtatgcagtctaacagcaaaatgtttagaagcttgactaaaattgtctttatttaaatcatgcacaattgacatattatctactcttagttggcacacacaatctttcttttccatacctaaaaatacaatcagttgtctgaaccagatagcttcatttgatgcaataaatacagcttgaagttcggcttcagctgaactagtacaaactaatgcagtgtactttgatttccaataaaccgtattaccatatagttgaactaagtatgcattcatggaccttcttgaattaatatcttgtgaataatctgaatctgtgtagatttcaagttgtgtgttgttttgagttttaaattccaatgattgtgatttagtattagccagatattgaaacattctatttatcatcttaaataaatttatgtggggatactcacaaaattgtgccaggtagttcactgcatatgttatatctggtcttgtcatgacagatatgtataatagtaaaccgatttgcttcttaaattccgtttttgctttagctaaagctttttcatcactactgaataattcattttctggtaaattgacattaaaataataaccaggtggaagtgctgattttatcttagcattccattcgatattgtattcttctataatagaatcaatgtattcttcttgattaattgttattttattagttctaccatcttttgttcttgtaacttgtaaattcatgcctaaaaatctttgcatattattttcatccggagttatttccttcaatttgtataagctttctagatgttgatttaattcagtcattaattttaagttcttagtacttacaatcatatcatcaacgaatattcctattatagcaacaactttgcctttgacctttttgataaatgtagatggaaatgcatcatgtttttcgtaaccaaattttattagtgtatttgaaatttctagatgccataatctacctgcttgctttaaaccgtataaacctctctgcaatttgtatatcaccctcttgtttttgtcaacctttggggtatcgtagcctgacggtggaaaaatataaatatcttcatctaatttgctgttgagatatgcagttttaagatcatattggttaaagtaccatttgaagtgacatgtttgagcaagtatcgttctagcgatctctggacgtaatgttggtgaatatgtttctgaataagtgttagttgattgaagatcacctctagctaccaaacgtgccttaaaaatttcaacaggttttatattgaatacccattttgtatggatagtatcttttaataatggagacttgtttgaaacaattattggtttggtattccaagtttcttgtgcttcatgggaatcaaattcatttttaattgcggataaccatgattttgaatctggagatttaattgcagcattataagtttttggaaattgcttctttggagttattggtaagcttgtagtaatttgattgactaatattaaatgaatacgagtagttgatttggaatttttagcattaagacgtgcactacgtcttaaaggcgtatcttttttgagttttggaggtatcttttggtaaagtagttgttctaacttatcttctttactagtgaatttcttttttactttggtgttgttcttgttgtcctctggaataacagcaggtgttggctgggcaattggttcagaagggacaggttgatttgatttggttaataatgaaacatctttttccaagcgggataatatcttcttattcacttgtattttcttcttattaccatctttagttaattttgccgtttttcctaatatacggtcatcaaaaatttcaattggtttctttctagatctagttcgaccagcaacagatgatgatggtacttcaattggcgtattattttcttgtaatggtggagaaacttgtggttcattaataataacgttttcataatcagattttgtggttgttttattttgtggttcaatttctttagcaacacttgattcttcaacgggaacatcacttcctttcgtcaaattaagcttcttgttgttttcattagatttattgattttctttgcaactggatttttccctttggttggagggcggacctttggttttgatgatttgccattggatctatggggaggtagtgatgtttgttttggagaacagacctccttttgacttaaatcagttgtaattggatcaagaggttgagttgatggtgtgtcagcctctaccttcgttgtcttagaattgataattgattcactttttgtgttactggatgcacagttggaactattgccatagttcatttgacttgaattagtatttgaattgattatatcattagatgatggttttgtggaaattaatgatttattatctttaggaaattcatttgacaagttggattcttttcctttagcattttgtttaataggtgacattgactcactcattggatcctcaacaccttgagtcccgataatggtggttttgctacttaattcatcaatgggttttaataatacatcatcagccttatccttgactttcatttgttcacgggtagatgtattttgttcatcttgtatcatcttgtataattcatattcatctttgttttcaaagtccaatagatcattcatgaggaattcaacatcctcttttaactgattttcatttaccgcagcgagatctaatagatcgtcattttccaacgagaaatgaaattcatagtcttcatcttctaaatcatcttcatccatatctatgtccacctcatttgtgtgatgatggtcttcattttgctcaattacattgtttttactttcttcattggggttgtagtggataaaattttctatattattgttgtaattaatatcatcttcaattttcaatgataaagggttatcatgtaaagtttgggtgaaatttgtaaacttcttatcatatactgaagtaaaatataactcgggcttctttgtaaaagtgacatgacgagtatttaaaaaacgtccggcatttagatccccatggaccgtaggtacaaaaacgattgaaccgtgagtcttaggagaaaaacctaagtaaatggctgtagatcctcttggatcggttttacttccatatggtaagtcagcaatgtaacatttttcaccaaattcatgaaccttacttacatcaagtggagcataacccacagcaatggctggtgagcttcttaatttgtcagagtaaatgtggttccttatgtgaacagagtaatttgcagcttcgatccaaaaataggatggtagtgatgaacttagtaacattgatctcacatcgtttaaaattgttagattcaccctctcagcgacaccatttgatgccggagtataagtggatgttgttaatgattcaataccatgttctgctaaaaattttaatacttcttcacttaaatattcagatccctgatctgaaaacattttcttgacagcataacttttctcatgaaactgtctttcaacccaactaataaaatatttgatacattcaatagcatctgatttttgagttaaaggataaattcttaagaaatttgtaataccacacttgaaagttataatatgtctttccctggaaggttgtaaatgttctgtaatttggcaaatgtctgtgtagacaatgttgaatggtagattaagtagataaggttctcttgaaccttcgacggcagcagcacgtctagttttccctagtaaacaggaagcacaatcatgatcagtgtaataactttttaattctgaaatctcactttcagtaacaccaacaatagatcctttatttgcagactttaataaataagcagcattgatatgacctagtcttgagtggatactattgatactaatgagaggttttggttttaataattgatcagtagtaatgtattttaaatattcatcagtgataactggtagaactctttgattatagtgtaattcatattgtaaaggttcagtatttgtagtaaccaacttacattcttgttcatcaagatatccttggcaaatgatattatcattatttggagtataccaacatttgatcattaaaaaattatcatcaaaatcaatgtaaatataaccataaccagttgtttcaattttatgaccagtataactctgagcttcaaaatctggagttgcatctctataatgatgtaatagcttcgaatcatttataaaacttcttcctgcaccaccatcaatcataattttcgtagattgagtagtgcctcgcagttgtatcagcaggattgacttcaggaatattgttaatactttgaactttgactgcattctgtttaacttttgtttgggcatgagaatttgatttgttcttattctgcatgtttggttcaccagttttagttggcgaaacctttttgatactgtgaacttttgtgacagtaattggtggaactatattgcttaattcgttcctatctctcttattttcttttgtccataaatcaaaaaattcatataactgttctaaggttgagaaatttgatgaaaagactttcttttctaaggatacacccttcttctttgttgctaaattgataatttccctttgaatatggtgtgggacattgtttgctaattgtctcatgatagcatcatcatctaacacttcagtagcgtcatacatttccataatacattttaagtttctaacgacgattctaagtgcagcagtgttatcaaaattgtcaccaaatctaactttcttcaatgagtttaatggatcaatttcttcatttctttcaccaacgacatttgttaaaaaattgtctaacatttggaatccgtgtaaatgaggagcaaaaataccttctttaactgcaatactttcataagtctcagtggtaactctttttgagatacaagtagtaaataaatttcccaaaattttagtacaaacagtactagctaatttattgatgttaccttcttcgaaatcttcaaattcattaatgtaacctaaaccagtaaaagcttcttttaatgtaaaataaaatcggaaaaaatcataacttgttgttattgagtcagtaatgtgaatacggttattaatacgttcaacaataggatatctagcaatatcagcttcaacactttcttcatttaaaaggattttggtttcatctttcatagatgtgatcttatattcattagaaactaaatttgtaactaattttgaatcgtaaccatggctgtcaactgttaattctttaaggattttctctaatgatgaaatttttgcttctgattcatcgttagcagtttttaatgataagatttttgcatcaacaattttaaaatcttcttctaatgatgaaatttttatattagcaattttagcagcttttttttttttaataataagacttctgcttctaattcagcattagtaaatgctttagagttttgatctgacattttcttaataaataaatttggaattgattaactgttaacagaaaattcgaaaggagggaaaataagaatttattttgattgttagtattgtatacatgttttaaaatggaaaaaatttttattggaatttgtttcatttgtaaaacacaggttaagacactctgttctcccagcatgggtgccatgtcggtttttaatagtaatcctcgcgtaaatatactattgtagtacacttgaccatgaataataataaacaccattttgatattattatccacgatacagcagtcaagtaccaagtgttgtacttaatatgaacgtagttctaagaactgtttatacgtaccgttctgtatcttatgtaataacctctataacaatcggggtgatagatagtaagacttagtttgtgattaacttcgttatagaaggaggaactacaaagtatataaaataattagtataaagtcgacgttaatgtcgagaaaacttttcacctgctaatgatatttatcatatagcgacacttttacagtgagtgaggtcttggtataacggtagtcttttgtgtagcagatatgcttttttacaaattagatatcaaccattgtgtaatttcgaacatcgattataaatattaagaaaatttaaaaatatgataaaaagtataaaagtctttggacataaagtgctgtgttaaaataattatatgggatttttatttcaatcaccagccgctttttagattattgaggtgattcagagctaaattaaatgtgtgtatataggattgtacttcaatttcacctctcaagctaaatcaaatgcatatttactcttctgtcttaattgtttaccccatttcataaacgataagggacataagatcaaaagaactgagaaaagacctaataataaaccggcccagtttgtacccattttggtaaacatgaacgttgcaaacaatgggaaaacacccccgaaaatagatctcaaaaatgtgttacctgcaagagcacttgcagctaaaaccaaatatgtatcaatgacatagtttaatgatggaacaaaaatagaaattaaaccgaaaccagtaaagagacccgatacagtaggaacaatccaatgaactgttctatgataattacctgtccaacaaaaccataataaacctatagggaaagcaataccaccaaccaacataggaggtaatctattttcaggaatgaccttaccaccgctttctctcatttttctgttatatgttctttcttcaaaaatgcaataagccccacctaagaattgaccaataactaaaccaaaataaggtaattctgcaacacccggtgccataccataaccatctgcaaagacaattgggtatgcactcaagaataaataaaccataccataaatgaaagcattataaagtgtaataaaaaataaaattggttcagtgaataacatctttaaaggtcttgttaaattattttcagctatctcttttatagtcaatgaaaattcatcatgaggtgcatgaataccccaattacctgtttttcttctaatttctcttgccttataaaccaaaataattggatgatgtgtctctgattcgaaaaccaaaataaaagcaaatgatgcagctgaaaggataccgactaaaaattcagtccatctccatccaagactatgatttgctacaatgaaaccaccaataaaaggagctaataaaggaccaacgaaaactgccatagcaaaaatgacaattgcagtaccacgagtttcattaccgaacatatcagcaaaggaagcaggaacaacaaccaatggagcagcacctaaacaaccagcaaagaatctacagataagaatagattctaatctatcagagactgcaacagcaaaattaaaacaacagaacgtgaatgatgacataacaaggacaggtcttctaccgtacaattcagataatggagcccaaatgattggaccagtagcaaaaccaagaacgtaaagggtgacagataaagttgtaacaacatagtggacatgatagatttcagccaacggtaagacagcttgtgcaaaaattgcagaaccaaatgcaacacagaaagtattaataccaatcaatgcacattgaatcagctttttagataaagaccaattttgtggatgtattgggtcttttgggccatcaaatccaacagaataagcagacacatcaggtaacattgggggatactctttatcatcccccatcggtggaattggctcattttcatcataatgtaaatcatcaacaccagttaatcttttggataaccgtcttgataccttttcattagtatctgatgctaaatcttcattgtaaccttcttcatttgaattattcttcccattttctaaatccaaatcatttgaatcattgcttcctgtgtattgtgcgacgggttcagggactgaatcactcattttgtatcttgattattgaataattcggagttgtagttgggcgcctccgagatgaaaagaagtaggttctatggaaatatataaaaaaaaagatatatatattcaagaaataaaaacttaatcttattaagctaagcatataatatatttatatgtaatatctcatagggaaaggtataaattacagatttaaatctagatgaacagaatatttaataactgagtatgagatgcagaaattaaaagaaggcagggtagttttttccaggcagtgcaaatttgaatccttctttctatcggctattttctccaatttgtttcaaaactctgacttattaatgcatgcatgttaatgacaattaatttagaaaatatttaaattattaagctgtttaaaagatatttacttagaaaatgaattttttataagaaaaagaaatttttgaatttatattaacgttcaacttaaatcaaaagcataactacttttttgtcttaattttttaccccatttcatgaatgacaacggacataagatcaaaagaactgagaaaagacctaataataaaccggcccagtttgtacccattttggtaaacataaaagttgcaaataatgggaaaacacctccgaaaatagatctcaaaaatgtgttacctgcaagagcacttgcagctaagaacaagtatgtatcaataatataatttaatgatggaacaaaaatagaaattaaaccaaaaccagtaaagagacccgatacagtaggaacaatccaatgaactgttctatgataattacctgtccaacaaaaccataataaaccaatcgggaaagcaataccaccaaccaacataggaggtaatctattttcaggaataattttaccaccacttgctctcatctttttgttataacctttttcacaataaatacagaaaataccaccaaaaatttcaccaataactaaaccaaaataaggaagttcagcaacaccaggcttcatgccataacctcttgcaaaaacaattggatatgcacttaagaacaaatagaccataccataaataaatgaattgtaaattgttaagcaaaataaaattggttctaagaataacattttaagtggtcttgcaatattattttcacaaatttctctcattgttaaggagaattcatcatgaggtgcatgaataccccaattacccgttcttcttctaatgtctctcgctttatgaactaaaataattggatgatgagtttcaacttctaaaaatataattgttgcaaatgatgcagctgaaaggataccgactaaaaattcggtccatctccaaccaaggctttgatttgcaacaatgaatgcaccaatgaatggcgcaactaatggaccaacaaagaccgccatagtgaaaatgacaattgcagtaccacgagtttcattaccaaacatatcagcaaaggaagcaggaacaacaaccaatggagcagcacctaaacaaccagcaaagaatctacaaatgagaatagattctagtctatcagaaactgcaacagcaaaattaaaacaacagaaagataacgatgacaaaatgagaacaggtcttctaccatataattcagataatggagcccaaatgattggaccagtagcaaaaccaaaaacataaagggtaacagaaagagtggtaacaacataactaacatgatatttagcagctaatggtaaaattgcttcagcaaagacagcagaaccgaatgagacacaaaaagtattaaaaccaataattgcacattgacccagttttttatagaatggccaattttgtggatgaattggatcatctttcccatcgaaagcaacagaataagcagaaatatcaggtaacattggtgggaattctttattatcccccattggcggaattggttttgaagtatcaatatggaagttttctgcatctgtaagtttacttgaaatctttcttgtaaaattttcttttgattcaattgatctatcatcactcatatcagcaccattttctaaatcctcatccccaattgaagctttggtgtaagcttgaattggctcagggataagattactatccttttcactatcagacatttggtttatttaaataattgaaatgtttagttcgtcaaatcagtcaaaaaaataataacaaatctatgaatagcaattaagagaaagaaaggatactcagaaatgtggataacaaacattatttaaaagatgataaattgtagtttgctgattacacctcaattgattaattttgtatgtcaattagcaaaatattgatcttctatatttttggggacacaacatgatgtaaaatatttttttgacgtatatataggattgaaattcctgaaatagtaaccaaaaagcattttcagttcgttcaagtttccggttttttgtaccactgttagtattaagatctttttcagcatactcttacattggaacctttaaccattattatttccatgatacagtttggtgtgtaattgaatttctacagcttccacgtcaaaaatttcgttaaaaatttcttttatctttgattgttgtcacactgtttgcactgctaatataattttgttgaaaatttccgaacacgtgatgtttttttgttgaaatttgtgtgtgaaacactgactgtgagtgcccatacttgacaccacttcgattgtgatataagttgataactccggttaaaataaacgtcacaaatcaagtaattacgtatcattactatgcagatcatcactaagatactaaaaccttaattttttttttctttttaaattattaaattactaaatttgtaataaaattataatcttcttctaggactaaacaattttcgtctatataagaactgtactataactaactaaactataatgtaattattagcctaacgtcgtactctaacttcatagaattacgtaagtacacattgaggactatattacaaaattaaatgagatatttatattaatagagaaatgtatactgcactttttattgctactatacaacgttttaaagcagaacggttgtgaaaaagaaattattaactgcatgatgtattaaacgaatcatacatcatttaattgtaaaaactaaaagataaatatagttggaatcactgtgtatttttttatcttcaacatttgaatgaaaaagtttattatgatgtataattatcattagtattaaatgagaaacatgaatatattaggaaatcagtttatgtcaaaagcatatttactcttttgtcttaattgtttaccccatttcataaatgataacggacatataatcaaaacaactgcaaataaacctaataataaacctgcccaattagtacccatgttagtaaacatgaaagttgcaaacaatgggaaaacaccaccaaaaattgatcttaagaaagcattagctgccattgcacttgctgcaaaaactaaataagcatcaataatatagttcattgaagggttgaaaattgtaatcaaaccaaaaccagtgaagagacctgaaacggtaggaacaatccaatgaactgttttatgataattacctgtccaacagaaccataataaacctataggaaatgcaataccaccaaccaacataggaggtaatctattttcaggaatgattttaccaccacttgctctcatctttttgttataacctttttcacaataaatacagaaaataccaccaaaaatttcaccaataactaaaccaaaataaggaagttcagcaacaccaggcttcatgccataacctcttgcaaaaacaattggatatgcacttaagaaaaggtaaatcataccataaatgaaagcattataaagtgtaatgaagaataaaattggttcagtgaataacattttcaaaggtctagttaaattattttcaacaatttccttaacggttaaagagaattcatcatgaggtgcatgaataccccaattacctgtctttcttctaatctctcttgccttttgaaccaaaataattggatgatgagtttcaacttcaaataataaaattgtaacaaaagatgcagcagccagaataccagtgatgaattcagtccatctccaacctaatctatgatttgcaacgatgaaaccaccaatgaatggcgcaactaatggaccaacaaagaccgccattgagaaaatgacaattgcagtaccacgagtttcattaccaaacatatcagcaaacgaagcaggaacgacaactaatggagcagcacctaaacaaccagcaaagaatctacaaatgagaatagattctagtctatcagaaactgcaacagcaaaattaaaacaacagaacgtgaatgatgacataacaaggacaggtcttctaccatacaattcagataatggagcccaaatgattggaccagtagcaaaaccaagaacgtaaagggtgacagataaagttgtgacaacataatgaacatgatatttagcagctaaaggtaaaatagtttgagcaaaaattgctgaaccgaaagcaatacagaaagtattgaaaccgataattgcacattgagcaactttctttttaattgaccaattatgaggatgaacaggatcagttgtaccatcaaatgcaacagtataatcagctgaatctggtaacattggaggataatttctatctttacccatttttgggatatcttcatttggatcaattttcaaacgatctgcaccagttaattttcttgataattctcttgaaagatgagaacttgtttcaactctcattaatcttgcatcatcagactcaattgaaccagtttctaaatcatttgaattattgttatttggaccagtgaagggttgaattgaatcagaagtttctaattttacaggggttggaacattgatattattattattattattatttttattttgagtggaagaagaggaatctgatgaaaccttttctgaacctgttgtagaatcggtattatacattattgatagtctcgaaagaaagaaataaagtaataatgaactcaaaaaaatttttttttcagaaagagcctataaataaggagtgatttaaaattaaaatagattaataaaattttctatattaataatcttaaaattgtgaataagtctgaaagaaacatcaggaaacaaaaagaaaagagtaattaaggtggaaaattttttttttagcgccgctccgctagtgtggttgtttggatattgcaatcagtgaggttatttaaatttatctggggaatggagataatagtaacagtgtgtggataccccaataatctaatttataattctgtaaaaggtagattgtatcattgtaggttgtatgtgagaagggggagtaaaatacttcctatattacttttatttgatcctagctattactcccaatgttaccgataatacccgttggtaaccggtaaaaatacattgcccagtttttggtatttttctgttaagaccgagggctttattccttttttcacatctaaaatccgattatctccacatagtcccatagtcttaggaaataagccgataataagccgtgtcacgtgtattgtatgctgagcctcgcaaaagacgcgactttttaaaattgatatttttttgattgataaactgatctaacacaacatcatgaagaaagcatcgagttaatgaatcgatgaatacataagtatcatatatattggtaggcatattgtacttaagataacaaccaataacttacgaataaccattccaactgcaataagtcactatgtcatcaattgatccaaatacacaggtgaataataccgattcttcaattacaagaactttataccaaaaattacttgaatcttcacatccaatagctttattgtcattcataatactacgtttatctccaattgcaatttatatatttggtatgatatttacttcaaattatatattatttttcattttaattattttattaattgctgcagatttttggaatgttaaaaatatttcaggtcgtttattagttggtttacgttggtggaatgaaactaatgatttaggttcaactgtttgggttttcgaaaatgctgatcaaaatagatatattaatccaatagattctaaaatgttttggcttttaatgtatactgtacccattgtttggggatttttagcaattcttgcattattaaaattacaattattatctcttatattagttataattgcaatatctttatcattaacaaatacaatggcttatactaaatgtgataaatttggtaaggctaatagtattgcatctggtatattctcatcagtttcagctaatattttctcaaatttcaatcctttggctagattcttcccaagtacaacttcttaaggaaaaaaaaagttatgatattctattataattctataaaaaaacttatttatgtcaattatttactgttcaatttatatttaataaatgacttatgtgcaattttattagtactatcaccactccatttttctcctaatgcttcttcctctttctcaaattttccagattttaccgttttcaaatatgtacagttaatatcttcacgaatggtttcaagttccttatctttaataacataccctttgagtcttttatccttaaattctaaattcttattcagattctcacttgaaatgatctccataacaatttcaagtatacgtttatctaatataacattttgactaattgtcaacataacttgtcttaaattttcaatttcaactcctttaggtattctactaacaacaggtattggatcaattaaactaccaacatttgataataattcttttataaattcactcttaccttgtgaataatcaagtaaaaaatcccataattttttatcattaatcttttgaacaaatgttatagccttcttaggatccttaagtttatcaataatgagaatcaatgcatttttattctctccaatcttgctcattaaataaactagttcttcaatacattcatattcttcacaaattttaatagctttatcaattgaatacttaatatgtctctttaaaaagttcagcaattcatttttattgaatttagcaatcaagaataccatttcatcttcatagtctttaacaagtataccatcttcttttctcaattccattaaataaagataattcactttttccattttgttttctttgaatattttcagaactctctcaggtacaatttcatgactattttcaactaaaatatggatattggtaatcaattgttccatatcaaacccagattcattatcattccagtctcctaatccggatagaacaatttcaggtaaaaaactaaaatattgttcaatcagatgatgctcatccatgaactccaaaagtttggtatcttgtaacttaatcatctctgaaacacatttatctggttcatctaattctaaacttatcataatataagtttttcttaaatcaataatcctttcactatctgcattttcctttaacgacagtatatccgagatccttgattgtagttcatttaagtcaaatagagaatgatcccatttatcaaaatattttgtgaatgattcatactcctttgtatctaacagttcatataatattgaatcataatacttatgactaatttgatcttctataaacagaaaaggagttgatggtaatatatcacaatacttcaaaagtaaagatttactttgtaatttttctagccagtagttccacttttcaaccaacaattgtgtaaattcagtatcactactattgtctattttcaaaatttcctttagaaaattaaatgctttatcaaaattttgtgattggaaatctttttccacttgcttctctcccaattttaatctttcataatcactgaaatgtccttcacttaatttccaagcatcaaggtattcctccttcaaacaataccattctatcttgtcatccaaactaaatacttcaacaataatagcatcatttgcacttaccaaaatccatttaacatcattgagtttcataaggtggtaatcattcaaacctaatccccgataatcttttagtaataattcatcaacacttatttcatcatatgttttactatccataatgtttaattccggtggtataaactcctcatcttcatccttaggtatacaattcaaaatcatcaaatcatctttatatgttgaaacactcccaatcaaacaatcatccaaaacttcataacttatcaatccaatatcaagaacagaatcagttgtatttaaattatttacacttaattgccatatattcgacacccagcctattaaaatacgattatcctcagtaaattcaactttaggccagtataattccggccgactgatactttcaggtacaggtatatgaaatacttccttagatatacttgactgaaagaatgttatacctttattgttcgcccatatgattaaatcatttttatatttaatcattgtaacacatcctccattttcatctaaaattgtatcatttctttgattgaaccagttcttactgcaattgataacactaccaccagtacctccacaaataaatgatttagtctttgaataggactcatttattgcaactgcataaattggtctcttaaaattatatttggtcatttctgattcattaattgtagttcccgttgaagtttcctgtattcgtccaacaattacagtcccatccatggagcatgttgtgaaatattcaccatcaaaatctaatgatagtactgatgccgtgtgtgctttgaataatttaatagtttcataatttggtgtagctattaataccatccccgaatgtgtggcaaatatgaagatttttgatgtgattaaacatgcactcactggatccttattaaagaatctgggtggaagtttagtaagccttttgtatttaaataatggtgggtcagtttcatccatacagaaagaaaaagtctattatgatgaaagaaagattatcggtaattgtgaaaaattatactaaaacatcaacatttctattcagatgattttgttttcttcttctctagggtctcttatattcgtcatggctagagcaatcaaggggatgctcatcaagtgcgatccatcaatcaagtcacttatagtgaagattgatcaagattacagggatattgttattgaagaattggatgatatgcatttacttattgatccatccaaactcgtgtttatcaaaaaggaacttaatcgaatattagcagataactcatataatccatttgacgacgttgaagaatagactactgtatattacaatttttatgtagggttttgtataagaaaagaaaataaaattatagaaattaaagaaagttatgaaattagagttcaagattatcgatatcttgttgaacatcacgaagaatcatattatcatcaacatctacttcattatcatcatcacgtaataattttctaacagtttctgcccagattctgttgatatcatcaggttccatagcttgtgatataatatcaccttcactagatttttcactaagtaatctttcatggaatgatttatagattgtttgaaattcttcttgaataccatctaaaagaaatgttttaactcttgtatcattaatataatcatctattaaactttgtaatcttggtatctcattctgaatattagagattagtttttgattaaggtccaagattttggaaatacttgaaggcatagttgataatgtatcaacaaatgaattagatgctaatttaataaattgatggacaatatttctgatttcaatttgtagttcaacacgacaatcaacatagtcattaataacttttggaattacacctaaaattctatcaaaaaatgattggtgttcatttgagttaagttcgatcgtttcttgaggttgattagtgaaccttgaatacagacttttcaaaggactaaaatctaaaaccgtttcctttctggcatgttctatttcaaatgtattgatataatctctgaaaagaagtaatgattttatctgataaagcttatactcaatagtattattggtaataaaattattttccattgaaagaagtgttaaatgaacaattgaacttgtaatatcatcaaaaacagcttgatttaatgattgatagatttgcgttaacatttcaatagacttaacaataggcggatagatttgattagaggataatatatcatcattcatttctttattacttatgattaattcttttcctgttttcttatagttaacaatattaacctcaacatatctgtttattatgaaaattaatcttgtttgtgcatcttccaaaataggcttaaataatgcatcaaaatttattctatttatttggaattcaaaattaccatcttcaatattgaaaaccgagtatgatttcaaaagattaattagctcacaaagtgatttaatatcagattcttttaaaattttatttctcaataaataatataatggatcaagtaacgaagattcaaaaaatttatgaacagcagttaaattcatggaattgtcaatatctgacatttcattgatttcagttggtggtaagaaaaataaattttggaatatctcaaattctttttcaagtattttaacaaaaaatttcaagcttgtattagacatattgaataagagattctctgttaaaattagcatttgtttcccttaagtgtggttgaataatcaattccattatcaaagaacctctagttttaaaatattgattgtaaacatcatctagaaggttgaaataatcatcattaccatttgtacgtttgtaaatttcaacaaactaaattataaacattttccatattatctgtgaaatctttatatacaagagcgtcaataacaatgtttgataaattagcattatttgtctttgttgttattttttcaccaaccgatcttatgaatgtaactagataatttctaataagtgacaatgcacgaatcatacattgcgtgaatctaaatctataaactctaatatctttataatcagcacagcgtggttcatcaacaaatgcaatacactcatccaatttaaccaatattttatcatgaaaggaagattttaaaacaatttctgagttattgttcttattgagcgttttcactattgattcaagtgaatggaaatgttgaaactgatcattcaaatctttgtacaatacttccaactctgacaattcatcaacaagattagtacattctttttgaaatgttcctgtttgtgatgtaacactattatgaatatctacaagagcatctacttgtttcaatacatcttctgcatcggaaataaatcggttattttcctcttttgtatgttctaataaagcaagcagctgtgagacagccggtgggagagggttcagtaaagtttcagtttctgatggaatgtcaagatccaccacacccaagcgggctacttcatcccaaacgcgtcgacgttcatccaatgacaagggagtcagtaatgttgtaggtatagtatctttaacagttgatgatggaaatgatgatcttctctggctaaccggtagtaatataggattcatcattgtttatataagaacaactgtatatcatgaatctgttcaaactttgaacattgggattttttgtttacaaaaaaattggtgaaaaaattatgaatgttgatgagtataaaaaaaagttatcttgtcaaaattttgacggaactacagtttcctccatttaccattatgccaaacccaattttcatcaattaggttcagagaaataagttcttcaaccaccgctatgttattttgaggggatatgctattaaatacaggtaaatcgtttatagtaacagtattaccactatgagagaatatctttactatttgctcgctccatcgtctgaaaggagataaatcaatgacattttcattaatggagaatcttcttaaactgaattgcaacagtacttgtttactttgctgaaaccttaactttttccaatttctatacacagtctcatcatcagctaactgcacactctcttacaaaatccctcaacactatcatactaagtgtttgagaaaacattctctttttcatataataaagaaagtgtagtttgctcattattgagactcaaaccaataagagacttgacaacaactcgttcaagttcactcaccacatctaatgtgaaatatctatctatgattttttcataaaatgtactatagggaaccacttccccattctctaccatattcatttcaggcacatccaaattaatgacagctacagttttatgtctttcttttattcctttttcctttttgttgagttcttctcgtctttctactgaatgtaacgcacttaacgcgtgttgtgaacttaaatcaataacccatggtttattaaatatttccctttgttccaaaacatcaccccaccaatcaacttgttcattaaaccctacgattttcattgatttagccattatactgatatcctcatatcgtacttttattttccctaccatttgaacgtacatcccctcttttaaacctccatcaattttcacctccagttgagcccatatatatttatctataacaacgcgtaaattctccataaatgatccatcatcaatatataattcccaagtatgagtttcatctaattcaactatactaaaaactttccccactatattgaccacatttattggccaattttgtaacattcgtattccatcattatccaaaacaatacctatatttttataaacatcggttcctcttttcgtattgtaaatatctaatgttgaaatagttattggttcattcattgtttcacacaggtgaaacattgatggtatgtaatagttccatattattttatcaattatggttctgaaagctattcgtggatcattgggaacagtatcaatattcatgttcttctctaacttgtgcattgcagctcgtaatagttccatgatttgatgtcaaagaagaaagtactctaagtgaagcgttaacggagaaaaccgaaattttacatgcctgatttaattttgaatttattaaattccactcccaaagaccacccttcttctttcttttactttaaataaacatgcctccaattacttgtcatattctagataccacaactgggcgcccagctgctaatgttctatgtgaactttcatacttaactgaatcaaatgaaacaatggttaaagcattaactaattctgatggacgtgtaacgaattgggaaggtaatcattgggttactgaagaattaaaacctggtacttatagagttaaatttcatacgtttgactatttccaaaaaatggatagagaaacctttttcccatttgttgacattgtttttcaaattggtgaagtacctgataatcattatcatataccattattgttaagtaattatggatactctacatacaggggtagttaattaagaaaatgtatataagatgtatataagatgtatattttttactatactaaaaataagtgagtgtaatttgaactttggggatcaactatcatttcgttaattttataatcatttatttcaattctaatagctctcatttctcttggataataattcatcataatgtaaacttttttcatatcaggatttgaacgatcgtaaatatcactactgaatgtaataccattagttattgaatcagcaaatttaacattagcattttttttattatgataaatacaacttgaacttgtactcgcagttatatgttttggtttaaatggaccttcaggtaatttatatttactgaaaatatcttcatcatactctaaatgtgatttgggttcatgtttactaataaaggataccttacgtgtaagtttatttataactgtatgtggttgaggttgaatttctttttgaaagaatgatgtttcattaacacctgcaattgtggaaatataaccaagttcatcgtcgggtattttagaactatcaattttagaaatacttggtaatgacatatcaggatctatatatgaatgatcaacatcttcctcaactggtgtaaaaatacgtgtggatgattgttgttgttgtttttgttgttgttgaattggttgaattggctgttgaacttctttggaatttctcttaaatgatagatttttcattgaaaatgaagaaactgatgatatagatgatgatcttgataatggttttgtttttgacttagatttacgtgaaaataaacgtttcaaaaaacctttcttgggtgattgtggttcaattggtctagtttgttgtttcggagttggaacagaagttggaggaggtaccggtgcaagagatggggcaggcactgacgtcattacaagttcgggaacgggtattgattttgaattaattggagctggagcaggtttcggagttggagatggagttaatcttggagttgagatcggagttggagttgaagaagatgatgattgaagtggactggtatacattgattttgatcttagatggggtgaatgagtgtgtgatggagatattcttggatttgaggaagttgtagctgaagatggcggtgataaagttgtattatttgacccattgtttgatctattatttgatccagtatttgatcctgtatttgatccagtatttgatccattattattattttttaacatttgtggacggctatagttcctgttggagccattttgttgttgataagaatttttatggatctgttgttttgatagtggttgtggggtatttgaatactgggtatgttgagaatgatttgagtagttagattggttatattgaggatggttgtagtgttgataagggtattgattattttgaggcgggtattgattttgttgatattgatactgatttggagaatataattgatatttatattgatttgtaggatattgttgatactggtactgattattatactgattattatattgattatgatattgacttggatattgatttggatattgattttgttgatgatattgagaatatttctgaggatactttttaatctttgttctatcaacttgagtggtcatattagttctaggaacattcatattggtattattactaatattttgattacaattactattcactagagtatttgacctatatttatgcttttgacgaggtgcaaatctttcatcaatatttaacatttccgatacagaatttgatcttggtataactgtatgaaagttttcatcagttattgaagatatggaagacatggacattctatgtgacatctttgtcttatatttatattaaaacagttataaataataccaacacgagaatagaaaagagaataataacgatataatttaatcgatagatacagcaataaaatccagctaataatagcaacctttatacgaaatctaatacctaatactaatatgaagcaccccttaataaatttaaattaatgactgtctaaaattttttcacactttgccaaacgagccccgcgaaggaacccgttacaaggagaagggtcgtccaagccaccatcgacgcttcattggaattggctgtaggtactgataagggtggtgatgatggcatgttgatgtgtccctgtaggtattctctttgatagtgtgtaacttctgcccacgtgtttccatctaggagtggaaatctgcccttatctgtgtaaaatgatgattcaattgtatttatgtaatcagtatcgtttaattgacatgaccagtagatacttgcatcgaatgatggtaattcaactattccaccatcaggtttcggttcagcataacgtaaatgaagtgggaaattaaaggtcccattagcaattcctataatatttgtatcaattgatgcatcaatttcagtcccccatatatcaacaagatatgatggtaattctaaatcacatctagatattgaaatatcagaaaaaatagatctttcaagttcatatacatcaacaatatattcctttggtatcactgaatgaatacgcaattgacattgtgaattgtctctttctggtaaaatttcattaaaatttgtaatattaaaagccacaactggatggaaagctggttcatcctttaggaaagtggctgtaaatctttcagtttcacttacactttgatgtgcaataaaggggaaaacagttttaacgatttcatcatcattacctcttataccatgagcaattccttcattaactgttacaattgcaaattctgagttatgtaatctaggtattttactaatttgtgcataaatgtacattctaatatttttttcatcacctattacttctaatgcttcaatattatcaattttaatattatccggtattgtaacattcaaccaattgaaaatattactatattctattttatcatcatcattattactatgatatgaccaccattctttgaaaaatgttaattttgatttattaggagtatcatttttcaataattttttcaaccaattttcactttgtaatttataatcttccattgaggatacattgataggagatattgcaatattcaaacctcgattcatccaacccatccattcccttaatggtaaatggctcaatagattattattatcaatctccctattcttacgtaatgacaaatgaaatctaacattatccgattgtggtaaatcatctaattgaatctgagccaattgtggatccttcagtgaatataaatcatcaaacacagtatccctctctatactatccttcctctctaccactactaacgtacgcattgtccagtgtgccagtgtgccagtgtgccaatgtccaataacaatcctataagaagaagcagtgtagagtaaaacacaaaaaagcccaaagtgaaaaagacgcgactgaaagaacaccacacccaacaaattttcacatggtaaataattatgaagaggggccacgttggaggtttctcgttttatacttctctcgttataaattataaagactgactttgttgccctcgatccttcttaacttcctgtccttttaacctttggaatctgatctctttctttaatcttgaatttctacctcttttatcaactcaattactttaactaaaatgtctgttgtattctcagatattgcaaaagcttctaatgacatcacttcaagggatttcttccatgttgctcctttagctgttgatgttaaaactactgctgctaatggtgtcgttttcagctcaaaggcaaaatcttcaggtgataaagtctcaggttcaattgaaggtaactatactgataaaaaaactggtttatctttaactcaaggttgggcaactaataacgttctttcaactaaagttgaattagcaaatgctgttttaccaggtcttaaaactgaattagtctcagctgttactccaaatgtttcaaaatctgttaaattcaacaactattatactcatgatgctttatcagcaagagtctttgttgatttattaaaaggtcctgtctttaacactgatgttaccttcactcaagatggtttcaccactggtggtgctcttacttatgatgttgcatctgctaaattaaacaactatacctgtgctcttggttacaaagctttagattatgctgttgctttagttgcttcaaataacttatccgtctttactactggttactaccataaagtttctccacttgttgaagttggtgcaaaggcaacttatgattcaaaatcaactactccaaaccctgttgctttagaaattgcttctaaatataaattagattcaaccgcttttgttaaggcaaaggttaacgattctggtattgttgctttagcttaccaacaagaattaaccccaggtgttaagcttggtttaggtgctgctgttgatgctttaaagattaatgaagctgctcacaaattaggtgcttcattatcttactccgcttaattattatgaaaaaaaaatatcttattttaattctaaatttatgatgatgataatgatgatgatgattgattcacgtatattatattacttatacttatttattttatatctatttattttatagttatatgttagtttaaaaaaattacttatacttagatatagttaactctaaacaattataaatcatgctcttttcttgttcttattcttctttgcaattctacgtaatgcacgcatttcattctttaagacaccatcaaccatcttatatttacccttaacaccctttggtctaccagctaatctcttattagaaccagttgcaacaacaagtgtaaccttaggtttagtcttttgtttctttgtcatcttacccattaatgcttgaatttcagctgctttatcagcttcactcttactttcatcatccataataccattactcttcttctttaatttttcaagtctctttaatgcacgcatctttttacgtccttgagcttcaagaactttcttgattggtcttgcatttaattgtttcatcttttccttaattgctaatgcagcttccttagtaattggtctattaattttactatgttgatcttcttcttcaatgaaccaatctggtaatccatccttatcacgaaatgaatatttattaaaaccatcattaattaaatcttttttagtctttttacctaatgctaattcatgtgccattgtcattgcttgtgcagttgcaatatcaatatctgccttatgattttctctcgccttttcagttaattcatcttcagaatcagtttcataatcatcttcattttcttgattattatattcattagcaacaacttcaaaatcagaatcatcatcttcgtcatcattttcattatctgaatcatcactatcatcactactatcgacatccattggttcaggttccttagtttttggtgccttagttttttccttaagaatctttgtttcacccttggtattacttgcaatattcaaatcaacatcttggaaaattgaatcactaaagaaattcattgcctttgaacttaaagaattcttctttttacgttcaattgttgcaattaaattagtaattgcctcatcatcatcactatcttcatcatcactatcatcttcatcaacttcttcaccatcatctgatgactgtactttatcttcatcttcttcaataccttcccatgcatcatcatcaccacctcttgcttctttggctcttaattttgcatctctttcctttttacggtctttataagatgcatacatatcatttaattgatcctccaaatcatcattttcatcttccttattaatcaaatgcatattttttgatgcttcatcatctaaataaacatcagtattatttgacatagcatttgattcgttattaaaaataattgtacgtttaccactagctaaatcatccaattgaccagtttgttgagcagttttcaaattaaacattgtctcagatccaatatttgctgcatcaataccaatttgcatatctgttaacatattcatttgcattctttggatttccttttgcttttgtaaattagatttcctcttttctcgacgttgcttcaatcttaatttatctttaacttcctttaactctttatcaattttttcatcttcatttaattcttcaacttcaattaaatcttctttatcaacatttttttcatcttcttcaatacctaataaattacgtgcatgttttctccatctaatcaataatttaaaatctttacgacctaaaacttttaaatcattacaacattctaaaacttcttgtgttgtttgtttcattttctttaatattttccatctaccatcttctttattaattgtaaatttactaacttcaccaagtgtattgataacatcatcattttgttcaatccattcaaatacatccattggatgaaataatgtataatcaccttcttcataaccttgtctttgtcttcttttaacttcaggattaaaaacctttgcttcattattaacagttccttcttcaacttcttcaaaaacatattttggatctaaaaattttggatcaattttctttggagctttaaaatttttacaaacaacgaaaatttcggcagaaacatttctacttgcaggtggtttagttgcttcaactttttcaaataattgattgaaaacccaaattaaattattataatcttttgatctaaaaatttttgtaatgaaaataccaccaacatttaaatgttcaacagctaattttaatgcttgtaaagtaagttgagattgtgtataagcatcttgaacccaatttaaaccaacatttggagcaccatcatgcataacacaatcagctttccaagttttcatataaccagctaatttagaacgacaatcctctgttgtgatatctgattgaaatgtaataacatttggtaatgctttcattggtacaatatcaacaccaataataagagaattaacaggacataattgtgatgcaacttgacaccaagaacctggagctgcacataaatcaatgacaacttttgaattttcaaggaaatgtccatatttttcattaatttgtaagattttaaatgatgaacgtgcacgataacctttttcctttgcaagataatagtatttatctaaacgaccttttgcgtttttcttttgtactctacccatggttagttctgtttacaataagaagaattagaaagatgaatatttgaaaagaaaagaaaaatttcaggtaaaaaattaattgataaaaaatttttttttcatgttacgtactataagtaatattcaaaagattggctaagcaacgattaaatttcctagtaccactgtactaccttctttggtaggattagtgtatgggatttttcagtggaataggtagtgagtcattggatgagttagtggatcatcagaaacaacataaacataaaaataaacaagagaaacgtaaaccatccgtttcaatcccttcgaaggagaagaaacgacaattaagaatatctgaatggattaaatctaaaccacatacccaataccctgatgaaaccttattatttgtaggtcatttaccaccgaatagtgatgataagagagtaatagctttattagagagaattgcaggtccaattgagatagtaggagatattaagattgctaaaagagcagataggtagaggatgttgtgcatttataccattacgagatgcaaatagtgtacgtggagttatacgtgcagtcggaagaggtagagccagaattggagagagaagtttagtagtggatgtagtaagaggaggtagaactaagaattggttaccagttagattaagagggtactagattgtatagtgtagttattataatgtattcataacacacatgcatgtgtattgtatattcattgtaaaaaacacgtatattatagtgtaagaatgtaaactttaggatgtgtaacagaccaacaaaaagaaaacacatggcaaaaacatgtgaatttaatacattaaatacaaatcaattattgataatagttctacaacacttctttctttctacaaatgtctctattaggatcacttaagtgtattatctgttctgcattactatttggattattctatcacgttcaagaatcatgtccaattggtaaaccattaccattaacacctgaacctgatgctgtatgtgttaatgttcactctgttgctcaacacgtgatcccatactatgaaattagtaaagattacattctatctcaatgggatgcattagttgtcattctagataatgaagatttacctaaatccattaagaaggatgaagttatcagggaagaagcagaagctcttaatggaaagaaaaacgattaataaataatataatctaaaacgtataaatatacgatttgccactctatgtacaatctatataacagtggcaattactttgatatttctttgtataattctcatatctataatactactattcttcaataataacagtaataataataacagtaatagtaataattaaaccctatacttatacagacactttgtgatagatcagtaaagagaatcaaataaactgatcaaatttttattcctagtaaataaatttattctacttatttacaagttatacacatcattcttcttctttaaagcaatgaacgtgttacgtattatcagattcatagtggcgatctctgccatcgtgtatggttaccttcatgtctcttctcattgtccaataaatgctccattagttgcaactgatccattatgtcgttcagttcattactcttattcttatattgcaaattctccagtttatccttatattgttaaagtttcagattttgctgatagatcaattcatcctcatttatcatctattaaagaatcagtgcaaagcttatagagaggaacatgaacagtacgttattgatcaaacatataaaactgcttcaactataatttcatctacaactgatttcgttcaatcaactatttggccaatctcaagttcatgtattaaatcaatctataactcttccaaaattcttttcattaagtttaagtatttgtcatttgttaattataacatttatgttaaaccttatattgttaaaccattcaattatattgcaaaaacccctattggtgaatattcatttaaattattaaactcttcatatgttcaaacagttttcaaatatacttctatttcatataattatatctcatctatttttgagttatattcattcaaaattaaatgaaatatatcaaaattttacatttaaaggatcagatagttatagacttgttcaattaaagcaaaatttcctcaaggattatttaacttttaatggcggttcaactacatcaactgaatcaactgaaccattatctgattctagctcttcagttgcatctgcttctctttttgataaatatgataaattagttcaatccattgttgaatcctgcaaataatgattttaaatcagaatcaaatcaattatcaactaattatttaaataaattacaaactcaatttcatcctcttatgaaatcattcagtaaagaggttaatacaggttatgaaaatatccatgcaatgatttctaatattaataatccagatgctgatcatgtatctcgtgaagcttttagaaatgcactaagtgataaacataactctgctaataaacatgttgaattaattgaaaaggaaattgaatcaattattgaatcttatactaaagatatttataatattagaatagctatattagatacactggaagaatttgcagattcatcattattaaactattcaaatgaaattactgcaaatggtgatgattggtcagaatggaaaaaatttaagaacttgaaattcaaaattattaatttcagagattcattaattgatacaaaaccaaatgaagagtttcaatctgcaattaataaattgaagagtgaagtacaattgttagttaatgaaagtggaagttatctggcaattcttagagcaaaggcaaatattgaatttcaagctagagaagctcaagaagcccaattattaaaagatcaagaattaaaacaagataatgatgatgatgaattatatgaagaagaagtatcaacaattacacaaacaagatttgttacagagactatcaatgatccaattacttcttcatctacccctggagcagattctgatgctattaaagtagttattcaatcagatgaataattgttcttttactattttgtatttttcttttcatactatataattaacatatataataatatataattttctaaatatcaatgaccttgataccttccttgtctacaattttaacattcaatcccttaaaatccattggcattctcttatttaattcttcttcacataatttcaatagttttaatccgtcatcaaggctaatatcctcacgataatgatgatcaagtaatgacattgtataaaatgcagcataaccatgagctgcatatggtaaatcacatcttgttccaatataatcaatcatacttaaaaatccttcatctttatcattaacaccagcaactaataaattaacttgataaggacttcttgatctgaagtgatcttgctaattcatgtctaacaaatgatgcaatttcatcactttccatttcatgtccctctcttagtccctttaattgtacattacctttaatatattctgcaaaattgaattgtatcaccactttcacctgtaattgcaattacattttttttatttaaattaagtgttttatcatcactatccttcaaaattgaaatccctctagtgaaagcttttgatgttgcaatcaatgttgcatctttaagtctaatacccaatacaatgtccatattgaccgtgtttctctgtcaaatagataatcaattaaagaccttttgccctcagtaaggcgttggttgaattattttacaattttagaatctttaaatttctccatgttattatacaatttatgttacgtaatcaatggtctttactattactactgttactgttactgttgtaggaatctaaccttcttttccaccatttcttacgttctccctcatgtaaatcattgtactgttccaatatacgtgcagtgaggttgttaccatcactattgtcttgaaatctaataatatctccctttatttgatattcacccccatttactaaatcttttaaaacaatttctctagtacgttctaatgattcaatttcactaattctgtcaatggattcacttaagagttcatcaaatgcaggatgtgatgcaatttcatgaaatgctctcatcattggggacagaatcggcacgtacttgacaatctttcccaatcgtgaaaatatttaatttatcgtattcttcaatatagtcaggtctagtcatcacttgtcttgctctccaaagtggtaaatgtggtagattagatacttcaataaggtcagcattggtaccttgagtggaatctttagtatatttaaggcgtttatccatttcaactaattctttcatcaataacattgcactgattgaaaattttccctgctctaaaacatcatcatccatgtcaacccccagtaatgcacaattatttaagaaccagagcttttcgttgtcgataatctcgtgagctgccttaaacatatccttttgtgatgcaacatggttcagatgttgaggtctaccaccaattaaatggtatatcttattacattcttcatcactgacttctttatggaaatactttaatctactacccttcaatatcttactagtttcattcattttagtatcctcaaaattaataacttgcattcttgtagctaatgttttcatcttctcaaatagccaataatcttcactgataaaaatcattgttaacattccagaacatgagaagttttctgccttttgttgtaataattcaactaatgaagaatcaatcaaatgtgaattattcagcactaaaattaatggtttcttggtttttcctcttctattatacaaaatcttctcctaatttcataaatgcacgttcaatatctaacattggtgtagattctcttggtcctttcatactgaacaaacttccaatataatcttcgaaaaactcaaaattcaatgcactaccaatccgtagtctcattaattcaacatcagatgaacaatcaactatggcacaatcctctcctccacatctactaatactctccatcacagtactacttttcccagttcccttttctcctaatagcagataatatttacccttaactttacctgttactatctcatcaaggattttttggtgtggtctctctgcccataaatgagcatccatgatctctgtattatctttatgtcttgctaacatcaaagtttcttcagctttgaaactttcctccatcttccataaaacattttgtttgtatattttatggtacataacaccacctagtactaaaactcctagtgatgcaaacgttattaatccagtttctgcacatttcttcaatatacttacaacttctctccatccactactatttttgttcttcttattattattatgatctttgtccttggattttttcgtctcttgaatattacgaattcttcctttagcttttttaattacctgttcatcattattttttttgtcctcttcaatgctagataccatatctgatggatctatgggaatcaatggattgacatatcgtctggaacttatgtgaaacaatcttgtccctgctttgttcaattgtctgtacattgaagagaaaaagaagttgcttaaaaattaataaaacactaaattataacagaatttataattatttttaaaaaaataatgcaactctattcttatcaattctttactgtacacacaactttctttttataaaccaatgctgagattgcataaacgggatcagctaaatgatacatttatacggggattcatagtatcattagttagctgctttatgcagtatacccctctgccattgttaaaattgcttttactgttaattgatgttctcacattttggataagaacaattattaaaagatttagatattcaagggaaaggatattattaaatcaaatcaataattcaacttcatggtcagaattttcgcattctgcatttcaattggataatgtattacattatgatgtttggaaggataatttagtttcagggaagtacgattatagattaattcaagaaagattacatgatttacaaaattcaagaacagataataatttacctaaactgcttagtttattaagagccggaatgttgagaaacttcgggggaatatcaaataaaagattgtataatagaacttatattggtacaaaaagattaattgaacaatataataaagaaatctccaactgcttggaatggatagataataacgatgaaattaacaaccaaataaaattagatttctatcatgatgcaaaaactacgttaggctccactgcaatttgtctccatggaggatcattatttggcctttgtcacattggtgtcatcaaagcacttataaacgaagaccttctacccaatgtcatagttggttcgggtgtaggatccgcaattggtgcattgatttgttgtttatcaaaaacgcaagttcttgagattcctgaatgatgtgaatcaagcaatgcaagatgaagggtttacgttgaataataaaaatcaaaaatcaaacaatggagatgaaacagaaatatatttacaatggatagataatataaaaagaggtttaaccattgaactaaaactttttattaagtttatactgagtaagattggtaagataacatttaaggaggcatatataacttcaggtaaatcatttaatattttagtatacccaactctaacaaaataccaacattattaaattttttaagcacaccatatattacaattgaaagtgcgatttattgctccttgggtaatggtatattagatgatatagaaaatgatccaattggtgattcctataataacatctatcaattaatgattaagtataatgatgaaattaccgagttttcgacagttgaatgtacatttaaaccaccatatcaagttgggggagattccgttgagttaaaaaactcaccgtacgacagaattaccgaacttttcaacgttaatcatttcattgtatcaatttcaagaccatatcttgcacctttcttaaatggagattggagaattacatacaaaaaaaatacactgttaaaaaaaatgtcacatttaatcaatatagaattcaaacatagaattagaatgatgagtcgagttggcatattatcatcactaatgaaatggttgttagttgatgaaaaatcgatgttattggatacaaattatattcctatcataccagttggaaactcatggtttatttgggatatattcaatttgtttatgcaaaatcactcagtaatggattattggattaaatgtggtgaacgaagtgtttggggaattcactctttgttggaaacaagagtacggacggaaaaattacttgaggaatactatgaaaagtataggaaaattaattgatcagttgtcatatttaaaatacctaattgtatactatatatacctaaaccaaacaaagactgtataattaatgttttcctaaatttctatcccaactacattgttcaaaaaattggcgtttcttcaattttttcaaactctaaaaataccaaaaaatagttgtttttattttctgcttataagttggtcaatttgtaagttttttcaaacctgtttttgttaaaaatttattaactgatcagcaaacaaaacaccctatcaaaaggacgttaaataaagcattttttgtggctggcttacgtaagcaaaatcaaaaggatggaaaaaacttagttgacttgaaaaacaataatggtcggatggtctagttggttatggcatatgcttaacacgcataacgtccccagttcgatcctgggttcgatcattactattttttttgcaactactttattatttgctcctaatgaaatacagttttttttgtttgaacaattgaaatcaaaggttctacaaattatattaaaagaatatcgtcagatttttaacacagtttcaaatttattcacttatacaagtcttctgatgagttgacaattttgtcatctatttaaaatatagcttaacagcactatttgagatcaaatatgagtactgtctagactcgatttgattttcatttggaatcggacctgtagaaatggtcaaagtaccagatatatcatcagcacgtccggttgtcaatgcagtaagggatataattaatgatgaacggtgcaatatggaaggtaagtaagttgaggtgaaggatgatgatgtagatgttgttgatacaatatataatgcacagtgtttttgaatttcctgtatttgtgacattaatttgttgatagtaactgtaggatcaagtaaaagcaccaattccgggttctcgataatgaccaccggatttctatttgattttatctcagatattatacttgtgcaccatgaagctaatgttggagcatcagaatttatgaatgaagtgaaatgtaaattctcattattcttgatattgtatttaagaaagtacttgttgtatgtttgaatagtattagtaaatgagtacacatatgacggggatgattctttgttaattgaaggaaagtttggagataaaaaacactcattgttagttgagactgattgttgaagtatacctgcaattaaccaactaggaaaattggaagaatcatgcgttattaaagacaaagtattttgagaaggtgttaaggtatttgatttattcttgtagaaagttaatgcttgttcttgtaaatcagaagttgaagccattcttttatgtctatttgtttagctttataaagatcaattataaagagttgacgtatgaaaaaaaaaagatcaacacaatttgcaatggatgtgcatgtaaattttaaaaacttgaaaatattcatgtagtgaaaaattggacgactattgtaaaaatttttagtgatttaggttaacatgtttctttcacttttctttccactttttcgataaacaaaatgtcagtttaccgctgtcgcatcatacactgctgctgctaagagaccaattgaaccagttggccaatattttcttgctcatgcaaccagaaccttaaagggtcacacttggtcagaatttgaaaaaatcgaagctgaaaaaaatgttgtttcagttgaagaaaaagatgctgatgaagaattatttgatgaagaaattaatgatcctgaattattagcacatgatccaaaagattggaaaacatgtgatttgtatgctgcattaggtttatctaaattaagagttaaggcaaccccaagtcaaattgttaaagctcacagaaaggctgttttacaacatcatccagataaaaaatcttcaaagggtggttcattagaccaagatggtttcttcaaaattatccaaaaggcattcgaaacattaatggacccagctaagagaaagcaatttgattctgtcgatgataatgcagatgttgcagttccaactggtaaaattactgataatgctgaattttatgcggcatggggtccagtttttgaaagtgaagctagattctctaataaacaaccagttccatctttaggtgatgataacagtaccagagaagaagttgaattattctataaattctggaacaattttgattcatggagaacttttgaatggttagatgaagatgtcccagatgacaccagtaacagagaccacaagagatacattgaaaagaagaacaacaatgccagaaagaagaagaagactgatgataacaagagattgtctgatttagttaagagagttcaagctgaagatccaagaattaagaaatttaaggaagatgaaaaggctgaaaaggcaagaaagaaatgggaaagagaagcaggtgcaagagcagcggaagaagcagctaaggctaaggcagaagcagaagctaaggcaaaggcggaagcagaagcagctgcaaagaacgataaagaagcagcaaagaaggccaaggaagcagcaaagaatgcaaagaagaagaataagagagctatcagaaatgctgctaaagataacggttatttcggtgatgaagataaagcagctattattgatttagatcttgatgctttaattgattcatttgatgatgttaagttaggtgaagttgcatctaaattaaaggacattactggcgatgatgctaagaaggtcttaaatgaagttgctgctgaaagtaaactttcattaaaatactttgtttaattttgatataattaattaaatagattacgtatatattttacatttctaattaatgatgaataattttatattgaatcgagtaagtccattttaattctatatactaacattagtttgagtaagatacaaaaatatatggtcctaccaaaaccaccattttgatttctttgaactattctcgtaatcatttatcacattttgttgatcctttagattttgattcaatctagcaactaattcattttgttgtgtttctttatcatgaacatattcatcatattccattgcataccaagcatattgcattgtcatataaaccgcactggcacataagaaaaacgaagtcaaaggtcttttaaaatccgacaatgtcggtttacttaaatgactatattttagccaagcttctctttgtaattgttttatttttgcttcttctttagcttttaaagaatcaaaacgtttttgaattcgttgtaaacgttcatctatttcagcagatttcgatctatattcaggagttaatggcgactggggagtatataatttagatgtaacttgttgaactttcttttcataatctcgttgtttctgtaacatttgctcattactgagcgtactaagtttactttctatagattctgcagttattggggtatttgatgtcatttcactatttgatgtaggtttaacattttgatttgcttttttgacttgttctgccaactctctctccacactctcggaaatacaaacttcatcgtctatgaatgataactactaccctaactactactctgaactctttggaaagaaagagtctttaggttaaatttgcgaaattcattgaaaaataaaatcacagattttgaaatttcactttgctattcgaaatgccaccttaaaattacagattgctattaacatgaagcctatttatttactatatctagataatggaacaaagtgtaaatatatacataaaatacaacataataccttcatatataaaattgatagaatcttcacaaaaaaaaccatcaccattcagaatccccagttgctttttggaagacataatcttttccattgatgttcatcaaaccatccttaagagaacatttccatctatttctcactctctgcacacgttcatataagcataacataatattttgttcaatatcattacctgtagaatcaccaccttcaaattcaccattttcatcaccatcattatcatcttcatcatctgaatcatccaaatcactattaatggcatcactatcatttcctaaatcagaacctaaatcatcgtcatcagaatcaaaatcatcatttctttttgatgtctctcttggtgctgtagagatggatgatggattaattgtagtaggagctgaaataatggaacttggatctttctgtatttctaatgtcactcccccatcttgtccatttttagtcatggtcatagatacaggagctccaactggtaaaccatctgtgggtattgtttcaaataacgcatcatcagcatcttcatccttaattttaactttgatttcattattattgttatcattatcattatcattatcattatcttcatcgtcatcatcatcatcatcctcatcgttatcattatcattaatttcaggatctatctctgaagcccatgggaatgtagcaaccttggtagctagtagcctttgacgccagatattacggaggtcttgaagtgtttgttcatcaattccggcattctcaaaatcttgacgagattccaggatgacttcttcaattatatttgtatagagtgacgcacaacctgtattagacatgttccaattacacttacttaagaacggaatgtaagttaccaacaagaaagcctgaaaacactacagttgctaaaatttgcttaattttcctgtataaaagacgagggcaatccactttttcagcttttcaaccttaaattgctagtaggaagtcttttccttctttattgaggtgtccatcttcaccagaggttctaattgcggtgtgtagatgatttaaccattgagtaatactgtactgttactaacatataaaatactgtagatatatctgttaatctgataggaacacatattaaactgaacttaatcctactacaataataatagacatataccaaaatttgcgaaatttccgagattgaaatttatcgcaaattataaagagtttcatttggaagataattccgtttcacaaccgcactttaattgctatagtatatcataatttaatttaataattgaaagattaaaatactacttgaaattatcaagaataataagtttattaatcatattcaacaaccaaatatttaataatacactaccacaatggagtcaattgaatctctacgtgcagagaacaatctcctacgcaaaaaggtggaatatttaaacaaaataatcgcttttaaagatgcaactattgaagaacttcgagcaacacagacacaacccaatccatcggaagaattattgaaattgcacgatgtaattgaagagaaagatgataacaaacatgatgttacaaaaatggaagattcatacggaatacgggaggttaacgacgatgaagagaaatcaccttttttgaatgaaaatgacgttgatgatgacatcgatgaaattttagatgatcaaattcttttccatcaaaatagaaattcaaatgatatggatgattacattgaagatttagaggatttagaagaaccagaaattcaatttgctaatgtacacacagttaaatcttttcacaatgctatgtcgaatagcgatattaacaacaccagtaatccagcaggtcgtttgtcaatttcttcgacaacttcatctcattattcagatccaagtcttgaatctccatccccttcaccatccggcttcaactcaataactaattcaataactccttctataatacagcctagtttactgttactacctcatcctaatgatacaaatgatacattgagagaatctgattttactggtattcgaagctaatccaaataacgcctcacatattgatgatatcaacactacattatcaaaagattcatcctctgctgatcttcatcactctgaaaatgaacttattttcactccattacccgctgaagaatcactgttaactcagacatcaacaaatctagaaaatcattataaagcacatagtccgcaccaacgttctgtaacaccctcctcaatgtcaagtcactctaatttactgactcaagaaactgcattgaatttaaggtcaaaaaatgtaactccaattaggtctcagaatcaagatcaaaatcaaataagtagtaaagcattaaatcatagtcacaacacttcaatgagctcacaaatttcaaatggtaatggaagtcaatttttgcttaatactttatcacattgtgtgattagaattgaatcactaatagatcctcaaaccctttcgtcaccaccagattcatcatcttcaacctcatcttcatctacaaatatgagaaggaataattataaagtttcatttttagtttataccgacgaaaaccctgcttgtttgacaccaatatatagagttcagaaaatcttacattgagttactcattatggataaatcaataagacagttactgccaaatttaccaaacttgccggactttaatcaaattgcttcattaaactataagaactgggcaaatagtaaaaaggttattcaaaactacataaatcatttattatctttgttgaaaaatcagaagcctttaaaccaaagaaatcctatatggctaaaatttagtgattattttgaatttaaaatggatcctgaaaatttagaaaatcctgaatacagtgttctcaatttacagactaaaatcacatatttattttacatcagaaaaaattttacgatgaaaacttacgattttgttagtttgaaattcaacaacgattctagcgatttaataattaatttcattttatccaaatcttcagaagttttgtcaaaagatgaagtcaatgtatcgtataaaaaccaagagattataataaagaagaaaaagaagttttcatcttcaaaaagttggatattttatgctgaaagtgactatgatgcctcagaattatgctcaaggctctcagcctggattggcttctcaacatcagaggcagatgaacattgatatacctgatatttcttttgagcaaagtgagcagaatgatcatttagatacattatctaaaacctctcttagtgataacacaactcaatcttcatcaataaatgctccatggaaattattcaagaaatcagctaaaataactcaacaacagttaacaaaaagtccgaatttgagtattaatccaacttcaccattaaggggacattcaaatcacagtagctcaataacatcatcaccaaatgatgtgctgaattttaaggcaatgccttatgaaagtaaccaactgcaatatgatttaaaatcatcatcatcatcttcagttttattaaaatctcctatgaaattatcaaatgagatgtcctttaaaccaattgacgatacaccaaaatatttcaaatcctctttacaacattcctttgatttatgtcgaaaatataaaatgtactcacatgatgttccagtcaatagtataccagtgtatcacatttctatatgaacagagcggtgaaggttttgaaggtattttcagattgaatggtatgatgtcagaagtaaataaaattcaagaaatatttaatgagaattatgattgtgagttatccaaattatcacctaaaccagatgttcattcaattgccacattgttgaaaagatatctacgtaaccttgaagataaattaatatctaacgaagttacagtagaattatgtcaaataataaataaaaataccacgaataataataataataatgttaacaattcaacaaacggaaaggctcaaatgatatctttgagttcatatggagtgaattcttttaaggatgtattccaaagtaagattcctgaattgaataaaagtgttttatttgttttattcaaatatttatgtgatgttataaaaatgggtaaacataataaaatgtccgtaagtgcgatgtctgtattaatgggacccaatttatcacatacagatggtggtggacaaatttgtattgtattattagaaaattttgatcaaatctttgtataaaaaatagtgtaacaaaagttaataaataaattttaaaaattaaacacaattataaaggcagatgactacgaataccatttttaacacctttctccttaaccctccaagaacctattggtaaagtttcaatttttttaaccgttttcttaatccataagtaatagagcactattccaacaattatacatagaaagtttgtaaaataataaccatctttaatattgacacaatcaccaccattctctacacaaagatttttcatttcattagcataacatgaataaaatggtttatcaatgaatatagtttttatctaatggagaattagttgaattaacacattgtgaatacgaaaatttatcaattaagtaaagaacaataattttaggccattgtccaccaaaattagataatgtatttagcattgtcatataggtaccaccaatcaatggatcggcaattttagtatggaatgaacaaattgatacaaattgaatggttgacatgaatgaagttaataaatgttgaacgataacaaacaaaaagtatgaattactaatctcaccgttctttgggaaactataaactaaaacttgacccaaaatagcagcaattattctacctaaataaccataacgccaaggttttaaaggttcatcagaattagaccatctagctgcataatatccaaagatgatttcaaatgggaaatcaattaaaactgttatagctaaatcttctcttgaaaatcctttatctagtaattttaaatttgttgcaccttcattagcttgaaatgcaattttacaaactaaatgaagtacaataaataattgaatattagaaagtttaagaacgttaaacatcttataatagacacttttaatagaatcatcctcctcatcatcagttatgttatattcaattttattgacattatattcagtatttgacatgctattcatttcaatgttatctaaatcaattttgatatttggtggattttcaggcacaaataatgaaataaaaatagtaatagctaaatataataaacctgaaaatatcatatattcacctaatgtaacaaaccctctattttgaggaactgaacggaaatatttattcataaaatcttttgaattaaaagcaagaaaaatagtaaatgaaacaaagtaaccggtatttaaaccaatagtttgagcagttgatgcataactcaaagcatttttacttaagatagtcaatgcccatccatcaactgcaatatcttgagttgcacacatcaagatcaaaaagaagaaactaattgaaagtaatgataaattttgtaaaattaatgaattatctgaaatccaagaatcgatttttagccccaaaaaaatcaatgaaatacctgatattgtttgaattggaataatccatgaacgtcgtttaccaatatgagataaataacatgaatcaacaattggagaccaaataattttcaatgaataaggatatgaagcaagtgagaaaaaaccaacttgtgaataagataaattatttgatttgagtaaaaacggcacactaccaaatgctaaaccaattggtataccttgaataaaatataacataactaataggaaaaatcttggataatcatgttttggaagttgtatatctttttgattattttcatctttatcttgatataggctttgaactacatcttcttcaagatcggaaaatacacgtccattattaggtgaacgggatctacgatgtgctcccattttcaactcaatgacttgttattagagggaattggtatcaaaaattcaaaagaaaacaagatgaaacactacatcaacttaattagttcaaaaattaaaatacgtaatattggtaattaaagcttacatgctttcggtgataaacggctataagagatctatataggagatggtttctttataacttcacttttactctacagttcatttacataatgatattaagatacacttaagaagagctaactacatagattaacagaaaaatagatacgaatactcatggtactaatatatacctatctatcgacgtcttttggaatctctttcagattcatcttcattttcctttccttcatcaacaatttcttccttatgttcatcaatatatttattaacaaaatttacaattttatcctttaaattaactgaatcaactaaaacaacacataaaccatcactaccaacttcatattttaaatgaccttcattaggttctgcaattgttgcatcgaatgaatcaaaaaattcattaacattatccattgtccttacttgacgaactaaaatttcttccatatcactttcttcaacattaccacttggattaccatcttcaccatctttaattgatgtattaggctaaaactaaaattctaaattcattatcgaaaacagattcttctttaactggtaaattatctaattcttgttcatcctcttcaatttctcgacgtataatatactcttcgtcactcattgtatccacttgatcgatgtatattatatgaaagaaagaagaaaaaaagtaaaaaccaaaaaaataatttttgtattgaaaaaaaaaaataatctcagtcgatcaatacaatctctacaaacaccaagtttcttctcaatcaataatgacatcaccacaaccatcgttaactgcaattgaacaagaaactcaatcaatcaaacaactaaatgaactaatacaacatactatcggttcattatcctcaatatctgataatcttaacgtgtttcatgataatttatcaaattctaataaattatcaaaaatttactctgatatctatagagagaataagtcattaaatgaaactttacttgaaataaataatagcaatatagaaaaggatgaagaactggatactcaaatatcgtcattggaatcacaaattgctgatttgaaaaatcaattgaatagttaatgctttcaatgtatagtagataccctgtatatacccatgatataatataatttcataaaaagttaatggaataataataaataattcgttacacaagtaattcaaaagagtgttataaaatacaataggatctaattaattaattaattaattgattgataaattaagcagtacttccctcatctctaacaattttaaccattaaatcacccatatcaacactatcaccttcattagctaaaactaaatcaactttaccagaaactggtgctgaaataaccatttccattttcattgcacttaaaactgctaatgggtcacctttcttaacttcaactccatgtttaactctaacctcaacaacaacaccagccattggtgcaccaacttcacttggattatgtgcatctgccttagctcttgtaactgtttcaattgctgcctttttatcttcaattgtaactttacgcatttcaccatttaattcaaaataaacttctcttgtaccgtttgataatgataaatcactgattgctaacagcttaataattaaaactttacccttttcgatttcaacactaatttcctctccaatttcaggtggtgctaagaatgatcttgttggtaaaactgataaatcaccatattgttcataattcttacgatatgcttcataaacttttggatacatgttataacttgcaatatcagcttcagtaattgttgaaccaaatcttgcaaccaaatcttccttaatttcttctaaattaaatggttctaattctaatcctggtctaccaattaactttcttcttttacctttgataatattagttcttaaaggttcagggaatccaccatatggtgtacccattaaaccttcaaagaaatctaaaacagaatctgggaaatctaattcatttgctaaattttcaatatcttccttacttaatttatttgaaaccataaattgagctaaatcaccaacaactttggaagttggagtaactttaacaatatcacctaataacatatttgcatcttcgtaagcattcttagtttcttcccattgttcacctaaaccaacttgttgagcttggaaaattaaattagttaattgaccacctggaatttcatgtttataaacttctggatcaggaccttttaaatcagctccaaaacatgaatataataatctcatttcagcccaatatgaatctaattctcttgcagaactttcaggaataccagtattaatatcaccatctaatgcattaatgaatgcacttaatgaaggttgagaagttaaaccagacattgaattaacagcacaatcaacaatatcagcaccagataatgcacaagcaacataagttgaaacacctgtaccagcagaatcatgagtatgaacatgaattggcaaatttggatatttagatctaattgaagaaattaaaatttttgcagcttttggttttaatgtacctgccatatctttaatacctaaaatgtgtgtacccattgaaacaattttatcaattgtatttaaatagtattctaaattatactttttaccaggaattaacatatcacctgaataacaaatagttgattcaataacaccaccagcttttctaactgcatcaataccaacctttaattgatctaaatcatttaatgcatcgaaaactctgaagatatcaacaccattatcttttgcttgtttaacaaaatgatcaattgcattatctggtaatgaagaataagcgacaccatttgcacctcttaataacatttggaatggaatatttggaactaattttctcatttgtcttaatctttcccatggatcttcatataagaatctcattgcaacatcaaaagtagcaccaccccaacattctaatgcaaatgcattttctaatgcatgacttgtagttggtgcaatgttcaataaatcaattgttctaactctagttgctaataatgattgatgagcatctctccatgttgtatccataatcatacaaccatcaaattcacgaattttctttgcaaattcttctggaccatatttaagaaggtaagatcttaaaccaacagttgaaggttttgaaacatcaataattttacttgaatctcttggatcatgtaaatgaggaatttcagcatctttctttaatttagggaaaccaatttgacctttaattgatgaaccattaacacataaatcaccaagataagccaataatttttgagctctattcttagaagaaaccatttcaaataatgaaggagtatcatcaataaaagttgtccaacaatcaccagagatgaaaacaggatgagttaataaagctaaaaggaaaggaatattagttttaacacctctaattctaaattcaactaaagctctaatcatttttcttctagcaatttcataatttgaacctgaagttgaacatttaaccaacattgagtcataatgaggagagataacagcacctgcaaaaccattaccaccatccaatctaacaccattaccaccagctgatctataaacttcaattttaccagtatcaggttgaaaatttttagaaggatcttcagttgtaattctacattgaattgcaaaacctcttgttgtaattttttcttgtaataaacctaattgttctaatgaagcacctgcagcaatttggatttgagctgcaacaatatcaacaccagtaatttcttcagtaattgtatgttcaacttgaattcttggattaatttcaatgaaatagtgtctattttgattatcaaccaaaaattctgcagtacctgcatttctataattagcagattttgctaaagtaacagcatcttttaaaattgcatctctaacttcaattggtaaagttttagcaggtgcgatttcaacaactttttgatgtcttctttgaactgaacaatctctttcaaataaatgaattgtattaccataattatcagctaataattgaacttcaatatgttttggtttatctaagaatctttcaataaaacaagtaccattaccaaaagcagatttagcttcagatgaagctctttggaatgcatcaccaatatcatcaccttctctaacaactctcatacctctaccaccaccaccaaatgcggcttttataataactgggaaaccatattttttaacaaaatcttcagcttcttcaacagtttcaattggaccatcagtacctggaacaacagggacattatttctgattgctaaatttctagctgaaactttatcaccaacagaatcaataacagtatttgaaggaccaacccaaattataccagcttcttcaacttttcttgcaaattctgaattttcagaaaggaaaccataaccaggatgaatcattgaaacttgatgttcttttgcaattttaataatttcatcaatttgtaaataagcttgaacaggagagaattcaccctttttaccaattggataagcttcatcagcttttaaacgatgcattgataatctatcttcatgagaataaattgcaacagtatgcattgataattcatgagctgaacggaaaattctaattggaatttcacctctatttgcaactaaaattttatttgcatttgataagatttctgaatctttacgtagtttatgtaaagaagaatgatcttcaacagttgacattattaatagtaatcgacttttgtaaagattttaatttgattaaatgaatacaacactaaatggaatgaaatataataaatctggaaaatagggaaaaaggtgggttattgaagccttttataaaaatcaattgaaattgaaattgaaattgaaattttaattgccctgctaaactagaaaagggcaacaaaatttagaaaaaatcaaaaaaactacgtcaatttcctattgtgatggagggtcacgatattatttaaattgttatttagagggctcgtcactggagtcatgcgttattaattttaaaattttaacaattaatttgattaattggaaaatccccgggccaatcatttatagttaatatgactcagattattatcattattattattattattatcaatgaatcatttattatcatttattgttatttattaagcatatcggttatttttaaaggcttagaaacggcattttttaatattttatcccacaatcttatttagtatacccactatattgactcccattggccgcacaattattaactacttatagtctttttttcttgattttgaattttatagagagaatagtctcccttttttatactccccatcccatgctattatttccatatcccgggtttattttttaattataattgaatcaaattgaatcaaattgaatcatccttttaattattatattattaattcaccgttatgtaaacatacagaaaaacagttttttttctttctttctttctttctttctttttttttttataaaaattcaaattatacagagtaaacaaaataatattaaaaatatataaattatagtaataaaattaataaatgtatcaaacacttaatttaacttcactatcattaattaaatctttatatggttctaatgcttttttaattgtaacattaacaaatttttcagtttgttgaggtgctctaccaataaatgtacttggatctaataatgaatctaattcatcccaaattggacggaaatattcagtatttttaatacgttcaattaaatcattatctccaccttccattttaacaactgcacttgcttgatgtgataaaactctaatttcttcatgacattcttgtcttgatccaccatttttaaccattgccataataatattttcagttgccataaatggtaattcactcataattcttctttcaataactttaggataaacaactaatccatcagttatattaattaatgtacttaataaaatatctgctgttaagaaagcttcaggaattgaaattcttctaattgctgaatcatctaaagttctttcaaaccattgaattgatgcagtttgaaatgaatcttgaaataatccacctaaatgtcttgctaatgaacaaactctttcacttctcattggatttctcttatatgccattgcacttgatccaatttgtgatttttcaaatggttcttcaatttcctttaaatttgctaataatctaatatctgttgccattttatgacatgatgcaccaaatgatgttaatgggaataatgtatcaatatcaatttttcttgaatatgtttgaccagtacatggatatgcatattcaaatcctaataattcaacaactctttcatctaattgttcaactttatcatgattaccatgaaataatgataaaaatgatccttgagtacctgttgtacctttaacacctcttaaacctaaatcatctctagctctttggaaatttcttaaatcccataataattcttgtaaccataatgttgctcttttaccaactgttgttaattgtgcaggttggaaatgagtccaacctaaaactggtaaatctttatattcaaatgcaaatttacttaatctattaataacattaactaattttgcaattaaaatatcatatgcatctctaaggaaaattaaatctgcattatcagtaacaaaacatgatgttgcacctaaatgaatgatacctgcagcttttggacatgtttcaccgaaaacgtgaacatgtgccataacatcatgtctaactttactttcttcaatttttgcatcttcaatttctttatcagttataattaaatgatttttcatttcttcaattgcttcttcagtaataacatcaagacctaattccttttctgcaattgctaaattataccataattttctccaagttgaaaatctatttctaattgagaaaacgtgtgacatttcctttgatgcataacgtgatgataatggagttaaataagtatcgtttgaagacattatatttgattgtttatttgataaatgaagtaataatttaagaaccaaagtaatccaattgagataaagataaagataaagataattgaaaaatcaggaaacaaccacttctttaaataccttaatgctatatatctaccttataaatttgcaattaattaatttattttttgacttctctgagggaagggggctcaacttttagattagtaaacccattacgtaattatttatttttcttttattagcatgaatagaagcttttcatgttttcttgatgttttcagtcttttcagggacagtattattttattttatttttattttattttattttatttatgttgtattctctcttcgttcacaggcaattgatcaatgtcaacaactatacaatcagcaattactccaaacactcagggagaggctcatcctgctcaaaagaaactacgtaaaattaataaaccaaagaaatcaaatgagaaaacattatggttagttggtcattcaattacattattctttagtatactctatatgatgtattacgttcaaagaaaatctaaaactcatttagttccatggttagcttataaatttgcacttatgggggtttggttatcatatacaatttcattaaatactcaatataatttaaaatctttacctcattatggttcacttattgcaacagaaaatttccaatatttattattaagtgttgtttggttcttcaatagaagttctttatttaaaattttaccttatacaattttatcaattttacatatatcaaataatttcaaattgaatgcagttttaaaacaagaaaaattatttgcttatattatactttataatgaattgtttttattccctgttttatttgttgatacaatcttattaaaaggtacttccggttatggtttagttatttatacaatgtttgtttggttaagaattttacaaaatgaaaatgcaagattcttcctttatgataatgttacaaaacttgatgttttaatgatgaagattaaaaatgaaaaagttaagaaagtttggttaaaaatcaaaaaattcttaacttataaacaagctagatttcaacaaaagttcttgtaaaattgtataggttatgtatcgatcgattacaacgcatagtttatgaacaaacttaatattaattaaattagaaaagacgattaatctgatagttacattaaaaaaattaaaatagattatgtctcaaagtagacatgaaaattatatagtttaggatgaacttccactaaaaaatcgacaaggcgaaaattttagagcgcccgtaaccctatttctgtataaagatgtttagttattttaatgaaattataaaaaaaaaaaaaaaaaactactctactacagaataaaattttcttttcaataatcaaaatcagaagtttttgaatgcttggtaaatttgttatcttcatgaaatttggttcagaagcagaactgaaatttgatttttcatcatttaaatttgattattgaaaaagaaaaaaaagaataaaaaaacattactaaaacaattatgtttctctaaacataaaaaaagttatacttattattcatttctaatcagatggtgatgcatgtttattctaaggcacactaagattcaccgaatatttaacgtgaaacggttcacagtcatcatttgaaataaataaagtaaaatagtaaaaagaaaatattaaagaggaatattaatagtatatccctatacactaaacatttccttctcactcgtatgaacgtaaatctaagtaggcaactattaaatcaagaaaaggtggaaattactcgccttttatttggaaaaatttgttaaccctagacaatacgcttttattagggttttttcaatttgtacttagtgtgtaagaaatttatttaactggtatgggggagtatacttgatgtgctggaatccgggtatatagattaatacttatcgaattataggttatagttgcatatatgttttggttgtctttaatatataaaaagtaaaaagaactagctatacagagattttaattacttaagaaatttaattattaaaaagaattaaatttaattagttgctctggtgtagattaattgcttagaatgtttagaaacggccttgataacaccatcttgttctaattgttctaaagcaactcttgcaagagaacctccaatctttaatctatcaactaaaactgaaactgaaacaaatctgtaagttggaacttcctttaagattctgtcatatttttcttgatcaaggataactaaatgttgtgccttatccttaaccttaccctttgaccacttcttcttggatttcttaccaccagccatagctgcagctgcctttgcagccttggattgttgaatctttggaggcatatctgtaattaataaaaaaatagtaattaatgttagtatttgtgttcaatcatgaaatgatttattctaatatctaatgaatatactgattatctgtagttttctctcataactgtcatatccttttctattttagttcattttattatttttaatttttgtataatctttcttttaattcacaatatcatgttgaaataactacaacttatcaatatactgtctcagatatgctaaatgaatgtataataatcattgtgttgtaagtacatacttgttagcttgtttgattaaaagaaggatataaaaactctcaaaaaatatcacaataaaataatagtaaaaggtatataaaacataaagaaaggaattcaatttttcatgaaggtaataccatgatagtgctcatagtaattttttttcctctcatgtgactgtctttaaattatactagtagagaaatttaagaaaaaagagacgcacaattttttttcgttttttttttcaattttttcaatttgttaaaaaagtgaagcgtagccctggtgtgtctcacgtgcgtaaaaaaagggtttgtgttttttatattttggttttacaacatgaataattcgatgtgtaacaaaactgattcataaattatttaaatttattttaatttgtcactaagaataatcacgttatattcattagctctaccccccaacacatcacatcatggctaagagaacaaagacacagattactaaagatacagtagcttatgatgaagatgtagaatcttctgacgataatcaagaaatggaagctcctcaagttgcttctcaatcagtcatggcaactcgtaaaattgcaggtcttggtaaaagatttggtaaaaaatctattaacaatactactgctactaataataatatatcaattgatgataatcaattatctcaaatgaaatcattaaatgccaattttcttaaatcaattaatgatggtatattgaaaaatcctgttgctgatttatcaattatttgtacaaaatatattgattatatcaataaagttaataataaaaaaatagaagttaaatcattagttgttccaaaagttgatgtaaatccaacaattatcaaagcagctgcaaatgataatgaaaacaaaccaaatcctttctcaatgtttgcttcaattggtgcaacatcaaataataccacaaccactaacactactactaccactaccaaacctattaaaaactcatttactgctccaatcaaaccatctgtttctgaatctaaaccggaaccaaaaaccgaaactaaacctgaaacaaagaacgaagttgttgaagttggttcagattcagattctgattctgaagatgaaaagaaacctgcaaaaccattatcaggacctgcttttgttattaatgaattaccaaaatcaaaagattatagttttaaatttggtaaagttccaaaaaatgaaccaacatcagattctgatgatgacattgaaattaaaggtccaacattccaatcaaatgctgttgtcaaggattcagtatttaaattaactccaccaacaaataataaaactgaagaacctgtaaagcctgcaataacattccctaccactactgaatcaaaaccttcaactggtttctcttttggcgctacaacaaaacctgcagaagattcaaaaaaagaagaaccttcaaagccagccttttcttttggtaatacaactgctccaactagctctttcacatttactgctaaaaaggaagattcaaagccaacaccagctttctcgttcgggaattctaccatcaccccagcgattactgaaactaaaaaggaagaatcgaaaccagctttttcatttggtaatactaccccatctgtcaatggatcagataaaccagcagattccaaaccaacattctcttttggtaataccacaacacctgcagcacctgcaactagtgctttttcattcaccccaaaaactgaacaatcaaaggaaactgaaaaatcaactgaaaaacctacaactacttttgcatttggtaacaactctacaacaacttcatcaatacctgctaaaccagcttcaacatttaattttactgcacaatcaaataataattctgttttaccaagtaaaccaacattcaatttcagttctaacaactcatcaactttttcatttggacaaaaagctgatgataaatcaacagaaaataaatctaatccatttaatcttggaaatggatcttttggtacagctcaacaaccaagtaatggttcaagtacttttacatttaacgcatctaaaccagcaagtaataaaactgaggatgaaataataagtaaagaaattaatgatgaatcaaatgaagttgaagcagatactgttaagggagatttcacagttgttaaattaaatgagaaagttgaagttaaaactggggaggaaaatgaagaaacactaataagtaaacgttctaaactttccaaatttaattcagaaggtaataattatgatagtgttggattaggtgaattaaaagttcttaaaaataaggaaactggtaaatttagaatattagcaagaagtgaaggttcatcaaatattttgttaaatgttttaattttaaaacaattaaaatatgaattattaggtgataagaagacaatgttaagaatacctgtcgttacatcatcaggttcattagaaacttatttagctagaattaaaactcaaaatgatggtgaagaattgttaaaagcaattcaagatgctcaaggacaattatagttttgaaaaaaaaacatccttttctgtaataataaatttcgtaaataaattaaaatctttttttatacaatgtaatccgaatataattaaaatctaaaaagtaatataacaaaacaaaaattaaactcttccacgttttaaaacattcctaacgtccttaataaattcatcgacatcaccaactgataaataatcaatatcaacgttgttctctgtatttcatcatttccatcatttctattattcattttgaataaattgtaaacttcctccttactaccaaataatttgtaactaatctttctaattaatgcaagacaagtacgtaacagaaatatatcaccttcaaataaataaatatctataattctcataacaatatcaatatttaattgatttgcaaagatgacacctgttaaactttgaataattttcaaactattgatatcacgttgaataaaatgattataaacatttgatgttaaatttaataaatacttatcaaactgttcctttatatcaacaagatatgatgattgaattgatgattgttcaattttcaaatctttcgttaatgtatcgggtatttgatcatcatttgatgtaagcattgaatttggtaattttttaactagtatcgaaataatacaattgaatgatgtttcgcaatcactgaaaacataataaaaaacacatactagattaatgatatcaaatgtattaatatctgtaagttgtgaattctttgattttagattttcaaaacttattaagattttcaggattgaatcaaaatgttcaccatattggaagaaattcatatcagggaatgaaaattgtaaaatatttgaacatttttcaataaaatcaatatcattgccaatattagggttttcctttaatttttcattctttattgattcctcagtagtcgatttatagttacatgcttcatcgagtattttctctgattcctctaaagagtttaatatatcatctttttcaattataacttttttagtacttattaattgttttaaccaaatttgccttctaaactttagttggcatatttctccaccaaagttctctggtttgaggtaatttaatcagtatatcataatctttaataactttagaccaaagttggacatctttctcatattgtaatattgatttatgtttattattttgatattgctttaaatttttttgttcattaattaattgtaattctaacagatttttataatctttttcatgtttcatgatttcatatttagcctttggtggtagattagattgtctagtagatgataaatacttgattttatcattattttggatagctatatgattttccaataaagatgatgatacagatgatgttgtagtagttgtatccaatgaattagttgatgctgatacacctaatggagatttcgaatttgatgttaaagtcgaagttgaagctcctaaattagatgtagataatgattttaatcttccatcattcaaagtttttgaagtatttggtacacttatatcactttgatttgtaatttgagacatatttttcaacattgccattctttgtaaagtttcctccaatttcatatctctattctcagttaatactttagtttcaattgataagggattgaatacatcatcttcagaatatctaaaatctgaaatatctgaagatttagagaagattgaggatgctctagttgcaggtgatgaaattgttgaacttggagatgaataatttggatatgggtatatattagtgctagtaaaatgtggtatattactaagacttgggttgatctttgtgttagataatgtcgtatcatctatttgctttgaaatattatgcgtgttggttatatttgaagattccttcgatgaaccagaagttgaatttgatgaaatgctattagctcgtcgaattgtattcattcttgaaatttttgattttttggtagaacttgattgtaaagaatgtaatgttggaacgtcgaaaactataaggttatcaggtaattcatcatctgagagaaaatttattgaatcaatatttaaattttctggtgaatttttagataattgatcttctgatctttgtaatctttgctttttaattattttcaacctctgagatggagttaatagtaattcccttgaatgattattattagttaaatttgtagttgaactaaccataagatgtgaattattagtatttaaagatatagcagaactattgttgctataattagaacgaatatttgttgatgatctgcttgagaatggattaggagttatattagcgattgtatttgatctcctgagattattgttgttaatattattattaccatatatttgattcttcctttgagaaggtttataatctaacggtatatcttcaaaagattcatgtataacatccagtgcttgtgacattgttaattaatggaaattttatattatggtacctcgtttaaaaaaatgatttgatattaaacaacggatgatgtgggaggcgaaatgcaaagcgaatgagcaaatgaatggtatataaagcttgtttatatagtgatgaatataaatatatgtataagaggtgttctctaatagagagactttggtctagtgaaagaagaaagtaaatgaagaaacgaagaaataaaataaacgatatatactactcagaaaagcacaaacgtgatgtgaagaaaacaatacaaaaatataaaacaagatcaacaataacagagaaggaaaaaaatggctggacctgaaaaccgcgattttgaaacaataacaaaaagaaaatttgggagataaaaatagagagtggcgcagtttttttttcttttagtgggagtgttgcggctggtgtttttatagtatgtctttactttatttcagtaaatatttaaatcctatttttaatattattattattattattattattatatacacggtatattattaactatcatcatatctacagagatcatttcttatcactagactcaccttcattgtttttcttttctcccataatcttcttgaatgtactacttaagaatgattcaattcttttcaaattatttggatgttcacatgctgctgtactttcattagcattctcttggaatactccctctaatggtttccaatctggatccatacgtttagctgatgtatcaccaaatgcatctgcaactgcctctaataatgcaatttgtgttgcattagtaggttttaatgttttaacatttaatgtaacttttaatacacccctatctgaacttctatcatgaactggaacaccttgatttggaatatctaatgttttaccactttgactaccacttgtaactcttaattttaattttttaccttcaattgttggtacttcaacaataccacctaatgcagctgttgtcattggaatttcaacattaactaataaatctttaccatttctcttgaacattggatctgattgaactctaactctaataattaaatcaccattacttaatttatatgaacttgatttagttatatgaggtgcatcacctgcacctgcaactctaagtcttgaaccatctttaatacctgcaggtaatctaacttcagtttgtttgatttgggttttaacaccttcaccagtgacatgtattacattgatcttcatgtgcaatttgtacaccagtaccatcacatgctttacatgttgcagccatctggaaacctccttgtaaatgttgaatatgtgatcctgtaccattacaaactttacaagtagatttctttttaccttgttttaatcctgtacctgtacatgtatcacatgcaacaattgcattataatttactttaatttgtgtaccaaatatagaatctttaaatgatatagttttcaaaatttcaatatcttcaccttggaaatgttgcataccacctctacttctaccactatgttgatttgtaaatcctccaaataaatcttcaaaatttatattctcaaatcctccaccttgtccaccgaatccaccaaatccaccaaatcctccaaatccggcaaatggattacctccaccgtatggatgtccaccaccttgtccaccgccttgactaaatgctgctgaaccaaattgatcaaattgttgtttcttctgtggatctgataaaatatcatatgcctcttgcagtgaatgaaatttctcttctgcacctttctcttgattaacatctggatgaaattttttagctaatttataatatgctttcttaatctcagatgctgatgcattcttattaacacctaaggttttatatggatcatcaagacgtgttgaattagttgaatgaaacttacgatattgtacccttggcttgaatttattgaatttatttgtagtacttttaacttttaaaatattgttagcattatgagtaagttttgaataataattatttggattcaatcccgtagtacttgaatgctttgaaaagatgagaactcatttttcccactgaatttttgttttcttagttaaatgaaaaagttgaatattgaagactaggaaagaaaagtttaaggattgaaaatataataaatccttatataaccttaccgaattttcattataaaccagatttaaatttcggttacaatggaaaattcgagaaaattacagtaataaaaagtaagcatttttacataatactttaaacatctaaaaaaaccaaaaaaataattgaagatttcgcctgcacccatgctgggagtcgaacccagaatcttttgattagaagtcaaacgcgttaaccattacgctacacgggcgaatcttgtttaaataaacttaatttaggcctcgttttttactgaatcagtcacgtgaccgctaccaaaaaataaaagttgtagttttttatttatttgttctatctggtgttattagaacatacttatctgtaaaaaaattagtaaatttgcgtaatttattgtttattacttacattttttagtttttaaaaaatcgtttttttttaaaaatttgattctataaatattttttaatattttagaacctataactcattttttataacaaaatatatacttgctcaaaaaatgtccaattaacagctataatgcataatacagaatgatttgaggctaaaattaatgatttatgattttaatatcataaaataatcatgctatatactagtttttttttatttttttaataatacaaacaggaaatataatacaaataagtaaatatggaataagatatataaataagaaataaaaaatagggggtatatgaggtataatgtcaattaaagatcttccatgatcaagtaatttttatttgactttttttcttgttctgctcttctaatatcagcataacttctattttgtctcttactcttatgtttagtaaaacaatgtctaaaataagaaatcagacaatttttcagattatctgaatagaaatcaattgacagattacatgaatgttcacaaagagtacatgcggcaacaacaccctttgaaagttttaccgaaaactggaattggcatttcttcaccagtagtataaacaccatgatctttacatacatgatgcatgtaagaggaatcatcaacattatggaaaatagtatttaagtccatacctgatgtatatggacaatatggacataagttttgtgtaatcggctttttagtaccatttggtttatatctgataactaatggctgataaaaatcttgcttttgtccacaccatctcagagaaatgaaatcatcaaaggcacgtctcttatttaacttatatttccaaccgtctttaccttcatatttggcaaattcattaacctcaatatagtttggcagtaatgaagcaacaacatttcttttaatagattccttgtcaatgaaaacaccaccaattgagtgcataattttgctttcatcagcagctgcaatttggaaagctttttgtgaacaaataacttcccaatatctatcagctctttgatatgagagacttgtgaatacaggcataattcttttgtttgaagctttttgagttttaaccttgatgttttcttgtgttaaattttgtttgacaacatcaacagcagtaacttcttcaaaaacaacaaacgccgcagtaatttctgcagaaacaacattttgtggaacaacttctaattgagacatttgaactgaaactggtggttgtgaattagtttcattattggtgtagtcattgttgttaaaatttgcttcaataccaagattattgataatatattgaagctcttcatcagattgaatcaaagaattttcattagctggtaatattgaagattcctcaaatctagtttgattttgattttgaaaattggaagcagtattttcagcttccatattatcaagaaaagctagtgcttgatcaaaatcaagttcatttaactcatttgccagttcgtaatattcaccacctggagcaattgagtcaatatcaaagccaaaactcgaatcaatcgagcctttatcaatattattgagagagttagaaacgttagcagtttctatttttttatgtttttccatcatttcttcacaaatctcatcaataagatcgatttcttcaagggttaaatcatcatcatcatttgacgaattggaagttttggaagtagtattatttagggagaaaacagtattttctggagaagattcttcaaataaataatcaagtgattcatcatcagagaaaacaatagtagtggaagacatttttaaataaaaatttaaacaaaaagcaaatttaatagtaagctaacaaaaagcaaataagtgagaaattcagcaataaaaaaaatgaaaatttaatgaaataaaaataagcaaagacaaaaacgagattgctattagggcggtcagtaaaacaagaggtctaactgctaaaagaggagaaagaaagaagtgaaggtaaagtgttaaaattaaatttcataaaagtggaaaagatgtctccttttatagttttccagttgttaacaaaacctgaaataattgatacttttgaataattgtaaaatttgttagtgaaatagctttagaatgcaaaaaatcagtctcgcttcccaatcgggaaatacaaattgcctatttgggtaaatggtcattttttgtgtcatgtcttctgttttttgaggtataatttcatataaagtgaagcaataaaatgaccacaaagaagaatagatgcatctagatcaacataacttgcatgtaattacaatataaaaaccttctagaagcgatttcatgcaagtttgatgcattttgagatataattctaaattttctgctttttttctcgtatgaaagtaaacaaaggactaaaaaaggtaggttgatttcaagaaaagggtctggtacagggtcttatttcaagataaaaaaatacatttaagaatgaaaccaattgagaagttttagctggagaagaaggaaaaagctgaaatgagatgaaatgaaaacaaaacgtaaaatataaagataatactgctactaataaacccaaacgtattttactcgcatcaactactgaagtcttcctagctatattaaaacatacacccaacttaaacactagatgaatggtagcaaaccatcaaataaaaggattaaggtcgacgcagcgagcgatatacggatctcttctttttttccaatcattgcctaatcaaattttataataattaatgcagcttaattgatgacattcttttcttcttattaacatcttcttattgttcaatgcaagtgatataaagaagcatatgatgatattaatctactagttttatttgcttttattttactgggtactatacaattttatggttataattgattaaacttaaagaatatcagcacattttgaaatacttcaattgttagcaccgtaaactcctgttttcatacacaaaattccccttggtttgtagatggaaacaagtgttccggtgctaccaaatgtaaggattgcactatatactgatatcaataacaataccatactaatgaaactgggctcgtcaccctataagaaaaagcaacttccacataaaattgaaaaaaatgcctgggccgtgctaagtattattgcatgcaaataatttaaggtgaagaaagactaaatgtaacgttgtagaatcatttttatatatcgttttttatatcatatagtatagtaattgtatatttctgaatatatcaatctattacatttccaaatattaatcttttctatttaggtttattcatttactaaataattaaaatactacggatttaagcacctttattaactaaaaaatatattatggaaagagaggaagatacgtcctctaagcagtcagaacaagttggaagtgatgaaactactgaattaaatgataaatcaactaagaataataatgattatttttccctacataaaataaataccgtataccctattcataacagcttaagtttatcatcggccttatcagcatcttcggaatctaatttatcaactgatcaaattctactccctaaatttgcttctgttagatcacctacaaacttaaacttctatttatcaccagtggtaacatctccatttgaaacattaaaggaagaatcatattcagcagagtttttaaaagccgcagcatcaaatacggatcatttaattgaaccatcctatccaagtattctgtatgatctagagaagactgcttataatgtcaggaaagataaaaatatacataattattcatcaattttacctcatgattatttaaatatttcattagctgatgaaaacctcaagttgaatcaagatgatattctgtcttatataataaacgaatacactcttttagataaattgtatggtgaagattatagtgatgttatttacagttatattgttgagcataaaataaccaagaagagaaatgttataagatttagttgttctttatctattggagttcttgcaagattcacgaatagttaccatttatcatcaaatcataattctcgtttggttaaaaatggattcccttttttgatcgaatctataaaatggaattatactccaagaaccttcccaagtgatacaccacatatatttcattgtgagaaattagagctatttaataatcataattcaataatagcttattacccaatcgaagatgactttattcctctaaataaatttaaaattcaaatgaattcagaaaatatactaaaagtcattaaaataacaataaatttgttcaaagctttgaaaaatatacatcaatatggaataacaataaactcattaactcaaaccaacatctttatcaatcctaaaactttggacgtttcattaatggaatttgatttctctttttcatcatttcaagaacaattagcaactccttatagaagagcaaataaatcacaaactttaaattatttaccgtacactgcaccagaaaactttttagagttgtcacctgttgattttagagccgatttttacagtatcggtgcaataatttatacctttttaacaggcaaggttcataaattcaataacattttaaattccattgtttcattacttactttatcaaagcaacaattacatgaaataaatccattgattccagttgaattttccaaaattatttcaaaattaacatcaatagacccagatgcaagatactcatcattagatttcataattaatgatttatgcactttgtacactcaacttacatctaccattattgaacatgatagtattacaaaatctttgaaaagaatccctatagtcaccccatttaagatagttggtaggaattctgttacatccttcttaacatcacaattttctaaaaattcagttaaaacgtttacattaattggtgatactggtataggtaaaactgcaattttaaactcattaagattacctacattaatcaaaaaatcatttttcacactctgggaatgtcaagatttgacctattttgattccaaatttgaaacttttgatttaatattatctgcattaatcagagacattctagtaatggataaaaatgaaatcatgttttggcgagatattttaactggaatcaatgctgatttatcagtcctttttagaacagtccctgaactgaaaattttattaggaggtaaatataagcatatcaaaagatctaaatttgataaaatgttgcaaaagcaaaatctgagtcatcaatatattctaaggtgtgtttttgaattattcagtaaacacgcaggttgggttttggttattgagaatattcaagaattatcagaaactgaagcttctttattaaaagaactttaccatcatcttaaaaatgaattctcagatggtgaattgaattttatgctattaacttcattctcaacaacgaatactcaagattttcaagataatgaaagagttccatcgtttttaaaggaaaatgtaatccagatagatcctttaacctttgaagagacccaaaaagttgttatgaattcattatatttatatgatagtcaattcttgtggaaaaaagttgatggaaaagaatccaaatattatcatgaacttgatgtatctcctaaaatgtcatgttctcgtaggaatatggttgagtcaattcatgcatatagtaaaggtataccattggttattaaagaaattataactcaaattcattttgttcaactagaatcaaaggaagctgttgatccagttgatgtttatcaaagatttatccaaaaatcacacccaatatcactcacaggtaattttaaactggattctatttatgatagtgttgctgcttatgatccaaaatcaatccaaattttgaaatatgcatcttgtatcgcatctggattatcctttaatatttacgatctttctattgtttcaaacatggatgtgtcagaactttatccagtactattcacaggaactattacttcagtattaacattttcatcaccagtttccaaactaccagtccatcttatcaacgataaagatcttcttttaggtcaactatccttttcagagaagaaaaaattattgaaatgtactcgtttcaaattcatccatcaaactatcttgaacaattttgttgaatcaatgaaaaagaataatgaatttgaagaaactcatagattatgtggtttaagaatagataaatacctgaaatctcttatcaaagataataaattatcactttccaattatgattgttatttagttgcttaccattttatgaattcatataatgtatgtagagctgaggaatacgcaatatacagcaaaatgttaattactgcagcatggtgtgcttattcttcatatgaacatacaacggcattaaatttttttagaactgctcaagctatgacaaccgatccatcaattttcaaaggattaaaatggattgaaatccacatatatggattaaaacaacagcatcaaaaatgtattgatcttgcagatgaggcacttgaaaggtataagaatcctgaagatgttgctcaatttatgatcgctagaatgcaaagtctgagatcattagaaaaatgggaagaagcatatgatgcatgttttgatattttagaggtattaggttttgaattagatcttagaaatatgtcagaggaagatattgttcagtataccgaaacagttttgaaacctaaactcccgtcattctatttcagaaatcagaaatcttagaaaattaccaaatgttactaatttaaaagtattgcttacacaaatggcattggtagaattaaatcaattttcagtttatttagggaagccatatttgttaccattttgcaatttgctgaatttttcacttttcatggaacatggtaaatcattttattgttgcttaagtctgattattattgctagtattgatgctttatctaatgctaaaggtcttaagagagcacaagaatattgtaaattaggttttaatatgactaaatccaatagttttgaggcaaatgaactgtttttaatttcatttagatggtattgttcattgattggatcccttatagagccagttgttaaaatttcacactcctttgatatttcaagttactaattctaaaattcaattattagaatctacattcaccaaggcgattattcttaaatttaagttacatatttggatcacacaaggcttaacattaccaaaattgaaggagagaatgtttgttttgaaaaccacatttcaacctaaaaatgataaagttcaaatttatgataaagtttatgaagctgttgttggaattcttaacattataactggtgaattcagatacgaggactatattaaaaattttgatcatctggatgataacactttcaaatcttttcatatcagtttgatttataacaccaataaagcttttgcatgttatgttttaaaaaaatatgaacaaggtgccaatattgcaatcaataaaattttacctggatgtttgaatgaattggtttctattgaaataacatgggcacgttatgtttctgttattctttgctacaaggatagaatcagacgaattgaacaaaatgagttacaggatcaagaaactgttgataaaattgataagatgatgagtgatgttcttatattttttgaagagttatctacacttaatccatctgtgtttttgtgcatgtaccattctgttgatgcactatacaaggttatgaatgacaaaaatttttcacaaattgatattctttcctcttttgaaacagctattgaagtttgttcaaattatcaaaattatttctttgaatcagtgattgccgaggaatgtgcaagatggttaacaaaggttagtagtcaaagtagattaccaaataaatatttcaaattggcttataatgcatatcacacttggggtttaatacaaaaaactcaacaactcgaggctgaattgggatcaattgttgactcatcattagacttacaatcacaattcaaattgagccaaaagtcaactaattctgaaattgtttttaaagacaagtatgcctatttaaacagtatgaaacatcaatcatcagttgcatctatggatttatcactttcacaaaattcagagagaagattaactccatctatagtatcagcatctcttaatgttggtgaagatatcaaatctgatttttccaaaacttcagactcaaaaggttattcaagtacttctaaatcagaagttgattcaactgaaatgtcgagctcattacatcttgctaaaagtgtgaatggagaagaaaaatattatgaagaaagtgcagatacaatggatgaagaatgggatagagatgttattatggatttaagtatcaaaatttctcaaagtaataatgttgaagatttattcaaaactcttttagttttttccttgcattttattgatggtgaatatggttgtattattttaaattcagacgatggaactccctttattaaggcaatatgcttacaaaattatgaagttagattcttagaaagagaaatattatcactgcgtgaagatttagcaccttcatatcttatcaaagattgtatgaccaaggatacttcaatttggagagattctgataaattttattttgatactacatatagagctagagagtcttattttgaaaataatgattgtgaaaatgtcatttgtataccaatcagaggtggtgaatcaagagttattggtgcattgtatttagagaatcaaagaagatctgtttttgtacaatctaaaaaaattgagttattagaatatatttcacttcaaacatatatctccattagtaaagttatgatgtttgagaaattagaaattgcaaaacatttagctgaagaggctactgcagataaggcaagttttttggccaatatgtcacatgaaattagaactccatttaattcgttaatgtcatgtgcaatctttttactagatacaaaattaaccaaatctcaaagaatgtatgttgaaacaatcaaaaattcagcattggtaacattaaatattattgatggaattttatcattttccaaattagaacacggatctttaacattaacatatgaaccatttgacataaatttatgtattgaagaatcaattcaattagttattgaacaaacattttcaaaaaatgttgaaattgttttcttagataatgcatccccattcaatattgtatacggtgatagaacaagaattattcaaattattatcaatttattaggtaatgccacaaagtttaccgataaagggtatattttaatcagctcaaatgttagtaaagttagtgattctagatttgaatttaaagtaattgttgaagatactggtattggtattgctaaaggcaataaatctaaaatttttcaattgtttaatcaattagatggatccagtaaaagagaacatggtggttcaggtttaggtttgacaatttctaaaaaaattgcagaacttatgggaggtgatttagattatgacagtgaagaaaatgtgggaacgaaattttattttaaatttgttactaaaggtgaaagttcccaggaaaggaataaatgtataccaggaatcaagaattataaaataaaaatatttgataatagagaactgagtacaaaggcattggtcaataagattattaaatttggtggtattgaggagaatatcaaaacttatgaaagtgttgaaaatattagctccattgatgaagaagatagagaaactactaatattgtatttgttaatagtgaatcaataaaaaatgaagatgaaatgaaaaagtttagaagtttttttgagaacagtagaatagtatatgcaattgcatatggtattaatattccaagttatattgaagatgataatgaagataatgaagataataaagatgatgacaataaagatgataatgttgcaaaaaccagctcaagtcaagatatttcacttgttaatgatatattattaacaccatttaaaagtgaaaaagtttttgaaattttaaaatcaggtaaggagatcagaaagattgataaaaaaaataaaaaagataaaatagaaccaagaaaactaaatatggatttagaaaaggagaaatcaagtagacaaaattccagtggtggagacaagatcaaattagctgataattgcccacttaaaattttaattgcagaggataaccccattaataccaaagttgtaaaacttcaattaaagagacttggatatacatctgatcacgcaaaggatggtgtggaagtaatagaaatgattgcatcaaaggaagcaaagaatgaagagatgtatgatttggtgctaatggatttacaaatgcccagaaaagatggatttgaggcatcagcagatattagagcgaaatatggtgagagtattagaattgtggcattaagtgccaatgtgtatgcagaagaaaagaatagatgtgttgatataggtatgaatggatttttaaataaaccattactgcccgaggcacttatatgccagttagaatcaacgtatagttggaaaatagataatatgtagttataaataatataaatatagtagtgtataataaatacttcctaattaggcaatgcgtaaataccagtaccctctcctgtttcatgttgaacataaatttccccattgggcagccccttgtcctgaaaaaggtgaaaattggctttttttctcagacgaggtaaggaatctaagcagcgcactgttatctgattcaattagagagagaattacaaaatctctgaatctaagttgacttctatatctcttgatttgtaatctgcttatatctatatcagattgtcatattataggatatataataaatagataatacattacattggaaactattaatatattctctaatttaatacaccattaggaataatttatatcaatatcaaattatatcaaataccaagcattgaaaatatctaaatattcgataaaaaaaatcaaactttaaatatacaatatataaacaaataaattaaatatgggttcttttaataatactattaaatgtgtcgttgtcggtgatggtgcggttggtaaaacatgtttacttatctcatatacgagtaatcaattccctgaagattatgttccaacagtttttgataattacgctgttactgttatgattggtgatgaaccatatacttttggattatttgatactgcaggtcaagaagattatgatagattaagaccattatcatatccacaaactgatattttccttatttgtttctcagttgtcgttccttcatcatttgataacgttaaagaaaaatggttccctgaaatttcacatcatgctcctcatgttccatgtataatagttggtactcaagtagatttaagggatgatccaagtgttatctctaatttatcaagacaacatcaaagtccaataactgctcaacaaggtgaaagattagcaagagaattaagagctgttaaatatgatgaatgttctgctttaactcaattaggtttaaagagtttatttgatgatgcaattgttgcggctttagaacctccagttattaaaaaatcaaagaaatgtacaattttataaagattgaactccacatttatattggctttctttacaaaaactaaacaaaaaaaaaaaacattaaaaaatcaaaacactaaaatattgtacattatttgatgaatgatatcaacacatcaatcaaacagctatgtcaggttaatcaatttgtaactatttattttgaaaacagttgtttacttatacatttttccttctttttatctttttataaaacattttttatcgattatattttcacttcaaagaaaacaaatctttttctacctattggtatactccagctatgtctcccatactataccatgtgtataatgattccactgtggattataacttcgttaacaatagacatctcccactgtccgggtaacttttcagtctattttcgcatttcgtgaattttttatttcgtaacatgaaaaagtgaattttgttaacaactacacttagaaaggagaagctgatttagcctttacatcgattttggttctattggattgtaatcgtgttcaaataaacaaacttatatatagatatacatttagattatcatattaactatgttttcaaatgcacgttcagagaccttatttttaggtggtgaaaaactaagtggtgacgatgttcgtaatcaaaatgttttagcaactcaagcggttgcaaatgttgttaaatcatcattaggtccagttggattggataaaatgcttgttgatgatattggtgatgttacagtcacaaatgatggtgcaacaattttatctttattagatgttcaacatcctgcaggtaaaattttagttgaattagctcatcaacaagacagagaagttggtgatggtacaacatcagttgttatcattgcatctgaattattgaaaagagccaatgaattagttaaaactaaattacatccaacaacaattatttcaggttatagattagccttaaaggaagcaataagatttattaatgaagttttaagtcaacctgttgaatcattaggtaaggaaactctaataaatattgctaaaacttcaatgtcaagtaaaattattggacctgattctgattttttctctaaaatggttgttgatacaatgttatcagttaaaacaactaataatgcaggtgaatccaaatatcctgttaaagcagttaatatattaaaggctcatggtaaatcatcaaaggaatctgtattagttgatggttatgcattaaattgtacagttgcatcacaagcaatgttaaaatccgttaaaaatgcgaaaattgcatgtttagatattaatttacaaaaagcgaaaatggcacttggagttcaaataaatattgatgatcctgaacaattagaagaaattagaaaaagagaatatggtattgttattgaaagagttagaatgattattgcatcgggtgcaaatgttgttttaacaactaaaggtattgatgatttatgtttaaaagaatttgttgaaaataaagttatggcagttagacgttgtaaaaaggaagatttaaagagaattgcaagagctagtggtgcaacattgatcagtaatttatctaatatggaaggtgaagaaacttttgaatcaagtttattaggatttgcagatgaagttgttcaagaaaaatattcagatgatgaatgtatacttataaaaagaccaaagaaacattcagcagcatcaatagtattaagaggtccaaatgattattcattagatgaaatggagagatcaattcatgattcattatgtgttgttaaaagaactttagaaagtggtgaagttgtaccaggtggtggagcagttgaagttgcattaagtatatttttagaaaattttgcaacaactgttggatcaagagaacaacttgcaattgcagaatttgcaaatgcattattagtaattccaaaaacattagcagttaatgcagcaaaagatgcaagtgatcttatagcaaaacttagatcatatcatgcagcttcacaacaagtttcagatgctgatattaaaagaaaaaattataaaaattatggacttgatttaattaatggtaaagttgttaatgaagttacaaatggtgttcttgaaccaacagtttctaaaattaaatcacttaaatctgcattagaggcatgtgttgcaattttaagaattgatacaatgattactgtagatcctgagcctccaaaggaagatcctcatggtcattaaatataggatagtagtttataatatcgtttaataaatattattagtaaaattaatactttaattcgacctgtcgaagtttttatttgatacatctatcaataaactatataaaatacaaactataattattattagaaaaaataaagctattatgtttagctattgttcagcattatcattactattttgaaattcttgaaggaccttcatttggatcaacttcgtaaaattcttgatgttgaactttttcagttaattcgatatcttcagcattaatattttgttcaatattttcattttttgtctttggttttggttcaggtccaaaaagtgtaactaataaaacgaatgcaaaaacacaaccaataaaaattgccataactttagcataatcataaattggtttaccttgaggggaagtaattgggaaactttcaccaattgttgtttcaattgtagatgaagcagaagatgctaaattacctaattgataagcaataccaacgacgattgctttgaaatttggtggtgccatttctgataaataaactggaacaacacccatagcaccttgaacaaagaattgtaaccaaaaagcacctgcattgatatttgcattaccaacaaaagcccaagggtaaatcattgcaccaccaccaatacaacaacaaataattgccaatcttctaccgataaaattagatgaatgaccgacaattataccaccaataaaggcaccaatatttgcaacacaattagtaacagttgaagcattttcagaaaattcatatctaacggttaataaagttgggtataaatcttgggaaccatgagacatgaaactaaaacctgacatgaataaaatcatataaattaacattaaccaataaactttaagtgatgctttagccttttccttaaatgaaggttgataaataccgtgttctctattatacttttcaatttcctttgttctcataaataatttagtttcaggtaatgataatctaaaacatgtaataagaaaacaaacacctgcaccaaaccaaaaaagagctctccatttttgtttaacattatcagcaattgctcttttaaaaacaacagctaaaatataaccaaaagcataaccttgttgtaagaaaccggaaatgaaaccttttgcttcagcaggacaatcatctaaagctgttgcagctgcactaccgtagataccacctaacgtaataccaaataaagctctaacacctaagaattgttgataatttttaacaaaaccagtaccaatttccaaaatacaaacacagaataaattaataactaatgaaacttttctaccatatttatcaccaataaaaccaaataatataccaccgacagatcttaacataagaacgacagtaataccccaagtaatatctttaacagttttatcgaaatccttagctaattgagtagcattaagagaaactgaaaagaaatcataagcatcccaagaccaagccaggaaagcagataaaatcatcaaccattgtttaaaaccaatcattctaagaccgggtaaaggattaagtaaatgtttctttgcagcaatggattgttttgatgggaataattgtgtaaatctagttataaaataaattttaaaattttcccaattaatgacaggtttatcaatcatttcctctaaaccattattaatcattaaattttgatcttcttcatcacttttaaaagtttgaacagaatctgcaattgatcttgtttcccaattatcttgttgattcattattaaattatttgaagaatcaaagaggaaatctagtaataaaaaaagtattagaatataagttcaagatattttcagtaaaaattcaaacagttgtacatatcaagggctttatataaggtaaacattacgttgatctatgattcaccaatatcaaaagtaataaagtaattgtttttaacataattgattgtggggaaatgggatccccccaggataaacggaaaccacctataactactatactaaatgtaatacacatcaagtgttgttattacaatagaaaccttattttaatcaatcatcataattccataataaaatctgctatgtaaaaattcacgttatgatgaaaacctaggccggttctccgcccagaatcggtgatttctcactcggaatttctaacttttcccggcccttctccgccctctctattatcgatgtttccgcctttttccgcttgtatctatcttcctcattaaacttactgaataatattatactccccttgtattcaaaccccacattttaatatactacaatcctctaaattgataggcaattatcggtgaagataccacacttgtgtgaagtatcgtagaaattagggaaataaacattctccgtatcggagatccttttaatagtaaatgcactaaaaataccactctattaattaatctattggttattaattggtactaaaaataccaagacaataatataaattttagatgaagtcacggatttttttgacttttgatttctctaaattttcgttattgttttttatcagcaatggttataatttatttggataattatagtttactcatcctttatagcattggttgagtcactattgtctaaattgatctaattaactttttgtcaattgtcttctttgttacgttttctagctcctggtttttgctatattaaaagtattttctggtgtttcttcttatgactactcttaatcggtttttcgtatgcaattttctcttatggtgtagtgaatataacaatttgatatcagtcaataaaatacttcaatttcctagttataaattgaattgtcagtttagtaactatgagtataagtcatttactctatgatattattaatactgagcctccaaacaaattaaattaattacgtaaccaactttaattttttcttaaatctgttcggaacgagtttttccttaaggtcactaaacaatttttatacgaccatttcttaataatttttttaggattttttgtcggaacgacgagctttacctaaaataatatactgtttcaaatcaaaagcttaaacgtttacaaggctttgatatcatttagtgggcttaaaacattcatataatcaatcaaataattaaatataagtagagatagaactctataatcatttgctagtaaatattacaaaaaggaaaaagaaattttaaaaaaatttacaccccatatataaaactttaaagctcatctaaataaaaattttgatatgacgaataatattgatgaacataatgctaaaattgctaaaaaagcaactggtaaaagaaaatttcataaaaagagtaggaaaggttgttcaacttgtaagaaaagaagagttaaatgtgatgaaggtcgacctatttgtggtaattgtgaaagaatgaatattgattgtcattatttaatatctgataatttaccattaaattcaactccacaaactaatgatgaatcttccaatatttcacctcctccaattaaaaaggaaattaaagttgaatttgaaaataactttaataatgtaaatcaagttgatacaccagtttcaactccaacaaatacaaatgataatatatcaaatgattttaataaattttcattaccgataaccccattattacaaaatgctattctatcagatcaacaaattcatcaacaaaacaatacattgtctccaatatcacaatttttacaacaactaccgcaatcacctgtaaataattcagcggctcaaattggtatgcaatttttaaatagtttcccacctgaaatgcaagtgaaattgttccaacagtttcaacaattaccccctgataaacaacaagaattatatcaaagtttaccaatgagtagaccttcatctgaaaatataactaataataccaatcctaatgacaataaaaacaaaaataataccaccactaataataacagtaataacaacaacaatgattcgttatctgatctaataagtaattttttacctgataaatcatttacaaaaccaatattaacatcaaataccactccaacaccggaagaattagcagctcaatataaacaacgttctcaaagttcacaaaaattaccaatacccttatcttctgaacaatctaaccgtaatggaccttcattatcacctgattcaataaggtcaccattacctccaatgccaaataattcaaattcctcatcaaacaccggttcattatctgatttaaatatgttagatttaagactaatgtatcattatactacaaaagtttggccaacaattacagatgctggaatttcagattctaaaatttggtcagatgatataccaatgttagcatttaaatatccatttttaatgcattcagttttagcattttcagctactcatttatcaagaaatgaaagaggtttagatcaatgtgttacatgtcatagagctgaagctttaagattattaagagaagcagttttagaaatgtcacctgaaaatactgatgcattagttgcagctgctttgattttaattatggattcattagctaatgcttcattaccaacttcaagttcaattaaatcattacctgcatctgcttggattttccatgttaaaggtgctgcaacaattttaacagctgtttggcctttaagtgaaaaatctagattttataaatttatttcagttgatttaggtgatttaggtgaaattggttatgatttaattagtggagaattagcaaatacttcagatagtaatgaaaattcaagaagtaatagtttgtcaagaaatgaaaagaaaaataatatatcatcctcagataatacaattaatacagttgaaaaaatagctgcattggctgcaaagccaataatgaaaaattccaaacaaaaattctcttcaattaaatgctttgatgatactatttctgatatgttcccagtacccttgaattcgccctatttcccaacattagcgtatatggcaaaacttcataatgaaaggaataaatctgattttatattaagaatttttgctttcccagcattattagataaaagatttttaggtttattaatcaattgtgatttatctgcaatgagaataatgagatgttactataaactactgagaaattttactgaagaaatgaaagaaaaagtttggttccttgaaggtgtaagtactgtattaccagcggatgttgatcaatacgctggtggtggtggtatgcatatgatgctggattttcttggtggtccgtccactattgatgatgatggtaatggtgaaaattatgttgcaaaatctgctgctcaatctggtttattggatacaaataatttaccaagtgcttcaatgtcagaatctttgggtcttgatgatggtctgaatcatgatattgattaataaaaaagaatcatccggttaatttatatagcaaaaaagtttataaaatgcaacaaaaattatgaaaataatggttaataataatgaagaataataaattaatttaaattatatgtagaaagatcaaaaattcctctaaattttaactctttgaataccatcactgtctcttataacaccaagctctaataatttggcaaatgcaagtgcaaattgttcatcaaaatattttgcatcatttgcaaaaatttcaacccatcttttaaattctggatatcttaataattcaacatcagtattcaacatcattaaagatttatcatcattataatactgttcaattcccgtttcaggtacaacacctaaactccagttttcttccaataaaactttaaaaaaatcattatcccaactaaatggatttctcgtccaaataccattaaatccgctatatcttgaatgacatcctccaataccgtgaccaccacctataagagcaactgtttcttgagcattaaaacctaatctattatagaaaacttcctgaatatgagaccagtcctcggtagcaattggcaatctacccattggaggaactttattagcatcgggacaatctgatcttcctggtttccattcaacttttggaccaccaattgcttcaatagcaacaacaccggctaatgtatataaatctgcaaaggtaatccaaggaaattgttgttgaacttggtctaaataacttttggaagtagtaagacctgtattacctaaatcattaaactcttgtgcaaatctcattgtaccaccactcgagccaccagttccagatgcactatcataatgtgcacaacaatgccatgtgaatctaatcatatttggaccaatagttccctcaggtttatatgatggttgtggaataatattcttaattgcttgggaaacaagatcatatctaccataagttacatgatctttgtattgatctgtctttggtgtagcctttctttttatttttattttataaaatatatttcttgatgaactgtttgaaacagttttatcattttggatatcttcaatttcatctttatcttttttggtaatttcttcaatttcttgcctttcagtcttttcatttgagttggtttgttcgcatacttgttgatttgtaaataagcctgggaacattggacagccagaagttgatgccttttggaaagttggtgaatttggttttgattctaaagtctttactattgaataaggttttggcacaaactccttttcattaacactactttttacaccatcattattctttgcagaatttaagtacttagcagttgtaattgaaggatatggattataagtgtaagaacgacgtgatccattgaaaatattaataggggaatgaaccacaaatctatcatagtaatacccagttctaaaccacattctcatataatattgattaatatttgttggtggatcaaacatatctcttacattatcattaacaggtaattccttatttctgattctacttttattattaaattttctttgttgataagttatttggaaggtatctttatcatgttccgtttcctgtaaaacataaaaaaggttataataataaacaaaatacaatctacagtaagataatgtgttcattattaagtatcttaaagtttgtaatgttgtttgaacatatgagtacggtaaaaaagccaatctccccaatggagagagtgtatcagttacagacatataacaagtttccaatgcgtccattgttgaagtctttacactatataggatacaaaaaaagatacaaagagatcgagaaagaagtgatgataactaactagggcaaaagagggagcttttgttctatttttataggggaaaaatggtagcaaaactgatttcggggatacactgtcatgaaaatgtcgccggagataaaatttaccctttctacatttatttatcgaagtttatccaatgatttcttgtgaatttccaattaaaatctttatgttatttgttatatatatatacatgtttgtaaattagtgaatataaaaaatgagtttatagtctatatagatgtgagtgaaaagtgtgcattctaccaaggtgattatttagaattaataacaacagtaacggttgcatctttaccttcattttgtaattgtaagaagtaagttcctaatttttgtatagattgtaattcttcacctgcttcatttctaagggtgaaaacggaattttcactaccaaagaatttagaaactgtgttagtttctctaatatatcttgacaaagtaccttcgatattattaataatgtatttcttatccattttggaaattagtgagttatccttagtattaacaactaaaattaatttctttggtaatttggcaaatattaaatctagttcagcattattaagaccttcaacatcaatagctaataattcatcaagatcaagtagtttattactttctttctttgatttttcaatttcatccttgagaattggattgagttttggtttcttttccttctttgcttgttgttgttgtgcttttaaagctgctaaagctgaagctgcagcttgttttgttactattggaattgcaggttctgcatttttataattcatatagatagcaccattgtttggataaagtttatttgccatagctgatgctttaacagcaacaatttgacccttaacaccaatacctgggaaatctttaagtaattgaacatcaattctatttttctttgattgagcggtgtatcgtataccagtttttgcaagtccgcaatcaacagcggaaaggacatgtgatgatgatctagtgaacatgtctggtatatgtagagaacgggttgtctatctaaaataaaccagagaaatcaaataactgattgcaacttcatgttgaagattcaattcatgaaggatgaaaaatacatgaaaatttgatcaccttaaattttggcgggtaactttttcaaatttgatgttgattcataaactgatctctctacagttctacatcgttacattatgaacagtattatattacaaaaatagtatctctctataaatggttagatcagaaacgagcttttctagcacgaccagtaaacttagaatctttacgaacttccttcccacgtttttcattaagaatcttcttacgtttgatatattctttcttagtttccattgccttaagacgtttctttgaaactttagttaatttttgagctgcaacttgtttaccattcattttttcaacttccataccatcaacattcaatggtctagctgaagaacctgcttgtaaaactaaataatgttttctatttttccttgattcaggatcatcaatcacaacaccacattggaaacctgcaactttagcagcactcgttatttgaactgtttgatcttcatttgcaggataaaattgtccaacgaatttacctccttttcttaatgatgaatataatgtattgaaaaatctagctaatctaaattttggttcatttgtattagtatctgcattacacaaccattgaatagcagaaattgaaatagctgcatcaaaagtacctgcacgaaatggtactccacatcccatatcagccaaaaacatatcaccatcaatatctctatcgattgcggtcgctaacatatcagctgaaatatccataccaatccaaacatgaccttcttcagttaaaatttccccagataatccagatccacatccaacatccaaaagaaaatgtgatttaccctcttctaaatttaataaatccaatgctcttaatgtcattttagcttgaatatgttgaacacgagatgatgcggtatatttacgagattcaatatcattataaaaaatctccggtggtgctatttgttctggtctagacatctctcaataaaagcagcagtagctgaaaagaaaccgtagaagatcaggacagggggatcaaagaaaagaaaagtcttttcaaaaggtaatgattaaatgaaataaaaatattttcttcttcccaaagaggtaataagagatagcaaaaaaataaattattacgtaagaaaaggtattaataaaatgtagcctgattgatggctcgggtggtttgaggactggtgatgctttcttcaatttaaatattcatttaactctttctttaaattaattgtactgcatctgatatatctaacaatcaaataattacatcccacaaatagagaaaatcaaatatgagtggtgggctaccattgaagaagaaactttcagagaatactctaaatcgtacaactaatggatttaaaaggtacaatataatggaaaataatacaatcaaaagcacatcttcatcggatgataatccggatattgatcacgattatttaaaattacctatggatttaccatctggtagaaaatctcttttaattgataatgaatatgaatcatcagatgaaagttctcaggggcaaattggaaacggtgatgatagtatagatatagccgtgaaattgactgaggatacagataagaataataatgaagattcaaatttacgccaacgggtacctacacagcctaatctagataatgttaaaatacctacaactacttccgctaaattaggttttcaaacatgttttaagtagtaaagtaaaatttaatagaaacggtgaaatgagatctaattttaatgatttaaatttcttaccaagagaaactatttttgatagggaaattcattttggtacaaaattttatggattttatgttgctatttggattatgattgcatttttcggtttgaatgttttaattgggtatcatcttgatcatggaagtatctttggttctgaaattatgaaattaatgttaaaagatatttggaaagttgcattgatggatttaggaatgtatttatcaatgtattttgcagttattattcagttagcaataaagcataaattaatcaagtggaaatatattggatttacaattgcaagtatttatgaaattttattattgattttaccattatattattcagataaattggatttcccatggattgcacaaatctttattatgttacattcagttgttatgttaatgaaagttcattcatattcattctttaatggttatttatgggaaattgttaatgaattggaattttcaacaattttcatagacaagaaagatgttttaaatgataatattgtaattgcgttagaaaattcaatagaattttgtaaatttgagattaaatcacaagatttcccaaataatattaatttcaagaattttttcaattattcaatgttcccagttttagtttatcaaaatgaatatccaagaaataaaagaattagaaaaagttatttattaagtaaaatacttggtatttttggagttatcttgttaatgattacagttgcacaatatagaatttatccaattgtaatgaaatgtctttatttacagaaaaatgaaactttttggtttagattaaaaaattatccatttattttaattgaatttattccaccatttctatgcatttatctattggtattttatttaatttgggaattaattttaaatgcaattgctgaattatcgagatttgcagacagagaattttatagatattggtggaattcaattgattggaatgaatatgcaagagattggaatgtaccagtacataaatttttgttaagacatgtttatcattcatcaatttcagcatttaaagtaccgaaaacattagcaacatttttaacatttttcttaagttcaattatacatgaattatcaatgtatgttatatttaaaaagattagattttatttactattattacaaatgagtcaattagttttagtacaagtttctaaaactaaatggatgaaggataagtatattttgggtaattgtatattttggtttggtattgttttcggcccaagtttgatgtgtactatgtacctcgtattctagaatagtatagtataatatggtataatttaaaataaaatagactaacggtaaatcatttcaaaaggtcttgtatcattaaaacaagatctgaagacttcatctactatttcatttgcatgatccatatctttacattttggatgaccaacaacgcttaaagcagctctacgtttaacacaagtttgatgaccttttgacattttcatcatacctaaattttttttaaattctgttaaaattgcacattcaccacttaaacttgcagcacgaatttcactacaagcatgatgttttaaatccatccaatcaactttaaatcttatattatcataccaatgaactaattcatgtgataaagtatcatttagaacccatttatcactaatataatttgcacataattgaatacctaaatcaggatgaaaaccacctaattttggatcatcacaaatttgacagttgattttctttggtgaaacataaccaccagattgtttaatttgatcaaacatgaatctaactgatggtgaataattaatcatccaagctttatattcatcacattttttacaaagttcctcttgcttttcaggtgataaagcttttgaagggggtattatctcaataggtttttcattattttgttcagacattatagggagtatctatttacagcttgatctgttgaagaactactacatcgattttatttcacagttaaatcaaattggtaataatcatgcaagtctagagtatttaagtgaaaaattaaattgtagcgacgtatcgtcccaaaaataaaaaatatttttttttttcattttccagtgcatgaaattttataaatttttaaagaaaatttgttaaatcattgaaagaaagaaagaaagaaggaaagaatatcaactaaacacaacaagacaatatgtccggtaatatttgggttgcagcagcagatggtagattagatattgttgaaaaattaatttcattaggagaaaatactgcaaattcaagagatcccaatggatttacaccaattcatgcagctgcatcatatggacatattaatataattgaatatttaatcaataatggaggagatattaatattcaagataatgatggtgatacaccattacatcattgtgaaaatttggaaattattaaattattaattaataaatataatgcagattataagattaagaataatgaaggattaaatgttaaggaatattttattgatgaaggcgaattccctgatatcattgcattcttacaaagtttagatggtgagagtggaagtaatacaaatgataataatgctggtgtgataaatcaaggacaagatagattagtgttaccaaatggagaagaaattaaagcattcttaagtgataatattgatagtataacgggtaatgttgatgatgttaatgacaatacaccagaaatgattgaacgtcgtaaagaagttgaaagaatactgtcaaacacagatttatcagaaattgagagagatgaacagttacgtaactatgttcttaacattgtttcctctaacatgggcaagttaagggatgatctcagtggtggaactgttgataatggtgataatagtagcaataaaagacgacattaatataatagctgtatctggttacataataatagtaaaactgtggcggaagttttaccgcttgtgttgtgtggctttagaaggaaatttgatttaaatacttatagatctgacatcaagatttggtttttgtaaatttataaacttataattatcaaacaacccaatgacaaaggcggagattcaattgtcaccagagattttatctcttgtatcagataaaactaaagtgagaaatccagttcatttcagagattgtattccaaatgccgatcatattaagaaacattcaaatccaattgctttaactggtggtatgccaaatcatgggttttttccaattgaaaatttacatgtaacattaaaagaaaaaccttttagttcaaataatttaattgaatcttcaattccaacaattgctaaagattcacaatcacaaactgatattaaaacttctttacaatattctgaaactggtggtttacctccattaattaaacaaattcgtcaattcgtttcaagagttgttaaaccaaattataattcatgggatgtaattgcctctcttggtggttccgatggtattaataaatctttagaattgtttattaatcctggtgataccgtattatttgaagaattcacatttactccaattataaatattttaaaggaaaagggtggtatacctgttccaattaccttaaaagaaatcttccttaagaatacaactgaattaaattatattaatgaacttgaaaatttattggaaaattggtcaactttaaaacctgatttaaaattcccaaaagttttatatacaattccaagtggtcataatccaacaggtttatcacaaactttagatcataagaaaaaagtttatgcattagctgaaaaatttaattttataattattgaagatgaaccttatgcttatcttaactataaatctttccaaaacaataaaattgagttaaatcaatcaaatgatgaatatatcaatgatttaataccttcatatacaactttagatacctcaggtagagtaattagagttgaaactttctcaaaaatatttgcaccaggtttaagattaggttatattgttgctcataaagatttaattaataaattattgaaagcttctgaagttttaactaaatcaccaaatggttattcacaattgatattaaataatgcaattttatcatatggtggtattgaaggttggattaaatggattattggtgttagagattcttatttaactagaaaaaatacattaattaataatttattaaattcaaatgcttcaaagaaaggttatataacaccaattgatccatcttgtggtatgtttgtttcaataattattaatattgaaaatcatccaaattttaaaaataaaccagaagattataaagatttaatggatcaactttacttaaagggtgttgaatatggtgttaccttcgtcttaggtcatgcaatgagtgttgattattcttattcttcttcaagaactaatttcgtacgtgctgctatctcttatgttgaaactgatgatgttttagttgaagctgcaaagagaactaatgatgcagttgttgatttttttgaaagttaattaatattgtaagttaagggtatatttattgttttttagtttataaacgtactatttacatctaatgtaatggtatttaatgttcattgtcctcgccgacgacattctcttcctcttcatcctcgtcttcttcatcttcttcttcgttcatctcaattaataatgatccattaggccataattcattgactttattcaattcctttaattcaggctctaattttaacctaggcattggtgaaactaaatcaaaattaatctttaattgagaatttagttcatcaatattatcaatatttacaaatttgaattcatactttgaaaaatattgtaaaagttcatcttcagattcaatcgtgctcaaatcaatacttccatcctctgccgatatacaatcaaaatctttatcgattaataatttatcaatcaaatgtttagaggcaacatacatgaaaatatccaataatgtctcatttttcaaaaacttcctgataaatctattaccattttgacttctaaattggattgtcgtatattctcccttcgtaaatttagttgaatcacgcttatagtgattattaatataattaatcaatatctctgaattctgatatttaattgcttgcaatttattttgcttttcaataattttggcaatttctaattcttcttgcctctttaattgttccttcagttcttgattttgtttatccttcaataatgattcttgatatgctagatcttgttgttctcttaaaattcttgcaaaatccatttcttgtttatcaaatctttgagagattagttgcggttcatatttagatacaattctatctaattttttgcagattttagttgttgatttttcacttttcaaatgaatggcaagtttagaatattttgaaacaatggaaaattcaggagttgataatccagttaatgatacattggcaatgagtaacagatatggtaattgcattgctttatatgttttagcaacttcaaatggttcaggataacaaatatctcctacatataacacaatatcatatttctttatgaagttaataaatatttcatctgtcaacatatcgacaataagtttttcagttaatggtgattttgaattaaataataaaacgcataaccatttataattggatcttgcctcttcatatgcttcgttaaattctcctttaaaaataggtaattctaatttctccaattttcccttctcttcctcttgtccattaaatgctttctcagttatatattcgtcgattttatatccactgacttcctcgactgtgttgtagattggaccagccgggaaaacgttatcactatcatcatctccaaaacctaaaatccttaataatccaggggcaaagttacctaataacttattcaaataataaccagttaagaacaaaaactctggcattaacattaataagaatattatagatgtaagaaatttacttctcttaactgtaactgtatcttttttcagtaatcctaattgaaacttccatttattactaattggcattgcacgttgaagtttaggcagcacggtatcagtaaataagaagttttctaatggaaggggaattgaaccggtattaccaataaagtcagttgacataaatggatcattattactcattatcggattaaagttattgttacctaaattactattaattgaatctgaagtgaataaaggttcatttaaactggaattggtagttgttgctgtgtttgaaacttcaacaaaaagttgtgggaaatcattatcaaaatatcttgctaatgcagtttccagattccaattacagacattaagtaacctctcaactttttcaccttctgtttcatcatcaaaatgagttatttctcggaattgatccaatacttgttgttccatgacttgttaatttaatgacaatatcaatacactgtgtgggactgtacaatggaaagatatataaaaaaaagaaagaaaagtgtatagcattaactggaactgattcctacaattttgccactagaaatttgaaagaccctcaaaatttcaacatctcctcgcaactaccctcacctccttatctacccttaccaccttcttaacatattaaaacatcgaaatgagagaaacttctctcaatatcgttgtttataacgtatagtggggactgataaatcatatcataatcgtaaattgaatactggtttataatgtataatggggactgatggatcatattataattatattataatcgtatattgaatactggaactacgtgttgtgagtaatgaatgattcttagtctaatcaattgtgtctaattgaaattgtagaattataaaatacataatgacaagtcaaattgatctcaattggactggataaggatagaaattaagatagaatgtcctaaattgttgttgttttaaatatatagtaaactgatggtaaagaaaagattaaaaatgaaagtctgttttatactgcggaacaaatgaaaccagagtttattaaagctaaaatgatgggacagtcaataatgaaaatgacagttttgaaatagtatttcagtgttttgattaacggttatcatcatgatcataacaaagttttaaaggtacgttttttttatattttatttttataattatattgttacattgaaaatttatgtatttgttcatttttgaaaaaaaaccattaaaaaaggaaagatagtattattgtttttttttaatttgtttgattatatttaaatttagaatctacctggggatctatctctgttgaattctctatcacctgaataatctcccatttcatctctacttgatctgtaatcatttcttggaggtggaggaccatctctaaaatctgggcctggagctggtggcataccatattcagatgggccacctggtggacctcttggtgggtaatcacctcttggaggatagtcaccccttggagggaagtcgcctcttggtgggaaatcacctcttggggcgtaaccacctcttggtgcaaaacctcctcttggagcataaccacctcttggaacaaatccacctctacctcttggcataaaaccacctctacctcttggcatataacctcctcttggcatgtatccacctcttggtgcataaccacctcttggagcatatgaatctctataaccaccaggtgggaccataattatcgtaaggacccattggtggacctctaaaaccacctctaccaccatagaatccacctctagcccataccaccacgatggaaaccaccacggccacggccacgagtaatttgtcttgaagcagatgcaatatatggtgaaagatcttcttcagctaaaatttgtgtatccttaaatttagtttcattaattgaattaattgcagtttctaattcttctctagttgcaaattctaaatgacaaatagttggttcttcatgaggaatacgaacaaaagttggttgaacatggatttcttcacgaaggaaatccttgaaatcttgccatgaagtgtttaatggtaaactactaaccttaactctattttcacctttctttgcatattctggcttatgcttagcaaattcaacttgtaatggttcaccttggaaagttttttcagctaattctttaaatgccttttcagcaatttcagcagtttcaaattcaacaaatgcgtaacctggcattaatctaagttcctttaatgcaccacattcagcaaagaattcttcaacttcttcgtgtttagcttgactgttaattggtctaacaaaaagttggactttagaatattcactttccatttctagttgattaattaggttgaataagttatagagagtgctcttgtataacagagaagaaacaatcaggaatgagcaacagtattaatttgccaccaaacattcaaaaaagtgggaaaaaacacttcccgcagtgccaaaacatgctacaaaaatggacaacccctgcgaataggcgggtaacttatttttagatacacttgcagtgggcttatcacttctattaacattacttagatgaggatatgatgattgtatggctaaattatcacacattaggtaactgtaggcttgacttttcagcaatttccgttttgtatataagtattcttcattggtaattgactattggtaattggtaaattatagtttatataggtaatttaacaatatagattcacctatacattgttctcattttttgtacttcaacatgaaatcgttccttaatgacacttccaaatatatttccccagatccccggatttctataaccaacggaacttccgtactaatggatttggcagcaaacaatatctcaatggcaaaagacgtggcggttgctttaactcctcgtaaagcaactactctacaatctgtacctacgctgaaatcaaattcaactagatcatatagaaataatgataataatgataataatgggaatgggaattttgatttgctgaatgcttcacaaagccaaatagatgaaacatccattgaggaagagtttgaaagattaagtaaaattgatctatcctatttaactttgttcaggaaaagttccaaattttcaagtattggattcaatcatttctttttatcacaagaattaaagtgtgatgatacttttactaatattaatgggtttaataatcacaaaaatggtcaagctattaacaattcagaaaatgttcttcctggtatggataaaaagttaaataataataccccatcaattacatcagatgaaacgaattctctatcaagtgatttacaaaggaataaaagtgtaatgacaatgaatactgtcaagtccaatggtacaaacaataccaaatcttctgaagctcacgctatttacaatctctcatttagtttagatggaaaatatttagcatctgctggtgctgatggtcttataagagtttgggggctcatcacctcagaaatggatagacgtgaacactacaataagtatgatcaattaaaccattcaaatattcattctgctgttaaacaaacttctaggaaatctttcatagatacagcttttgatgacactatcaatgatataacttcaattctgaatgtccctgaaatgaaagcatcagtttccagatctagaagaaatactttaatctcaaatgaaagtgatgcaagtagtaatataaatcatgggcttgatcatgaaaatgaatcatcaccagcaaaggataatgtttatgcacctgtgtttaaaacaaaacctgtcaaaatattctatcatgataaaacaattaattccttagattggtcaaaaaacaatttcttgatcagttcatcagatgatggaacggttaaattatggcatgttgatagagctgattgtttacaaacttataaatttgattgtgtggtaacatgtgctcagtttcataaacttgatgatagattttttgttgcttctcaatggaatggtagactggttctgttgtccattttagaaaaggagatcatatttgaaattaatctgaataaatcaatcacatgtattgaattctctccggaaagtgataaaatttttgtgggttgtgatgctggatatattttctctgtgatattggataaaaaaggatttaaaatagaagatgattatcaattgaagaaaaaaaaatctgcacatcgaattactggtattaaatgttattatgataattctaaatctccaaaatcatttttatcttcaaccccagcttataaacatagaacagatacagcagctaagagtgaaacaataaaaatgttgataacatcaaatgattctaaatgtagattaattaattacactggaagatttctagaagtgaaatattctggtttcattaataaatattcaagtatttcatcatcccttaatgaagatcacacacatttgatatcaggcagtgaagatggctggacctatatatggcaaatttattcctgacaaaaaaaataaaattgataatgaaaagaaaatgcttaacaaggcacattttgatatattaaatttactcaaggatgataaatcaatcattgataataaatattatggatctttccatagtaataataatagatgtaacgtatcaatatttgcaccaagagcagcatctaaattactagaactaagtaatgatccattatttgacttaaaacataaatattcatacgcgttacaggaggcacatgttaaagactcagaagttgatgatttgacaactgctattattgttacagcggataattcaggtaagattaaagtcttcagaagagactttgcacattatgttagaaaaggtttacaaaataaaaaagttcaacaaattattgaaaataaacttaaaaacacagttaataataattctaacaaaaaagtgcttaatagaaatactttggttatacctgattatgaagcaacaccaatgaatataagagatacaatgacttctgtttattctgatagttaattctagaggtagaggagatagtggaatagtcaaacctgcgaacaaatttgcagttgaatctgtaaatgaaaatcgtggagaagaatctgattacttcaatggtgatcataaattcaatagtgcacaacctactagacctcaagtcgtaccacaaattactattgataatatacatacaaatgctaataggagttctggaatcagtgctagtggctctgtacaaaatatagatgatgaacttaaacagttaatattggaaacaccggatattggtatggtacattcagttgaacaaaagcagcattcaagatcttcatcaccgatggggaaaaacttataacaaataattaattaaataagtgtaaataactaatttaaatatatcaaaatctaatataaaacttttggttggtaatcaccctttaattcttcatagaaaacgtcagtacattcaactaaaccagtttcggcaacatattctgaccaatgattaatcatttcttttagtagttcaggtttttcctctgataaatcattagtctcacctggatcaacttctaaattgaatagttgccacttatctggacccattggtttaggaatatataaagctttgtaatttccctttctaatagcttgttgagcaaataattcccaaccgacaatcctttcagaatcatgaatattcttttcatcaccatttataattggtaaaagtgatacacctctaactggttcaatttttctattttggaattcttctggatatggatgcttaatatcagctatctctaaaatagttggtaaaatatccataactgtaacgaattgacttctaattttaccattatcaatttctttattgttatttggtttaataattaaaggacatctaataccaccttccgacgcccacattttatacatataataaggagcagttgcagcttgtgcccactgatcagaataccaaacaaatgaatcttttttacctaaattatcaaattgattatgataataagtctcaacaaaatatttaaatctttcagcagttgttgccattgcttccatcatcataccttctgcaccattgtctgacataaaaagtatgaatgtattatctaattcatctttcctttcaagttcctttaaaacattaccaatttcatcatccataatttcaaccattgcagcataaatttccataattctacattcaacttccttttctttatcagttaattcactccattctttttctctttgagtttcaactgcatgtgggttaacaccttcaggtataatacctagtttaatagcattatctaatctttttcttctcaattcttttggaccatcattataaatacctttatatttagcaattttttcctcataagcttgaaatggccaatgaggtgcagtataggttaataatccaaagaatggtttatctcctctcttttcatcatcgttcaaaaattgaataaatttatcagtaaaatgtttagtactataaaaatcatcaggtatatcaattgcaggatctaatctttcaccattttcactgaaaattggggccaagaaatttaaatattgatcatttgcatcttttgggaaatatttataatggttaccagcaccgggtaataaagtaaaagaattatggaaaccccttttatcaggccaatgatcaggagataaacctaaatgccatttacctgaaataaagttataataaccattttcagataaaatttctggtaatgcagcaactttaaaatttagataaccttcataaccaggtttatttccaaataattcaggtattctagcagcaaattcacccatttgaccaagacctgcaatatgattatcagtacctgataaaagcattgatcttgtaggtgaacatgcactagctgtatggaaatcagtaaatcttaaaccagtttgtgcaagtttttcaatattcggagtattgatttcaccaccgaaagctgaagtatcggtaaatccaagatcgtctgcaacaattactaagaaatttggctttttagtcattgaattgattggttattgaaacgttaaacaagatggaagggttcaattacacattaatgatgatttatattccattaaactctgaatattccatcactgtgatccagtctccacagtttcgacggttgaattgtggctcttaaatttgatcggccgattgacctttatcgcaaatattacgtaattaatttgttgcgtcacgtgatgtggtggttggcccggccgcaataaagagagacttgtaagacattgtataagttcaatgatgttaatgtttcagtcatttgaaaatcatgctaaggtacaattggtaatcaacttaaccttatgataatcttcaaatgaaaagaccgaataattttatcagagaatatgacttttaagattcgtgtttttttcacttgaattatctttagagagtattatcattccatattaaacaccatcataattccaattgatacatccattcaatgtattgatatatcaattttatataatcggcaaagaagaaccaaacacgataacaatcaacaactctcagcctccaataaaccttacataaggagcgaattgcgtaatgcttaaaattctcaaatcttcaacatgaatttctttattgatcaatttcaacacggtgttataatcaacaatctcttctgttcatcaattagataatggaagtttatgtatccaatagtgtccaggataggacttttgaatttcagcaagcagttaaaacatttgcaagacaaaacaatactcaacttgttaataataataccaataacaataataacaatgtcccaagtaaaaatgaatttaatagaaaagcaggtatgattgcaaaacatattgtacatgttacaggatcattaactaaacttgcacacttagccaagaagaaacaattatttggtgataaaccaacggatataattgagttaacatatgttattcaaacaagatattttcaaaattgaaaaagaactcaaagatttgaaaacattacaaatatcaaataataaaagttcatcagacgataaccaattaaaaatgtataatagtaatgttgttcaattattaaataccaagacaaagaatataagtgagaattttaaagaagttttaatggaaagacaaaaaagtgaattaatacaacgtagtagacaagaacaactgcttgcagctgttaaaagtactacagctgaaaatggaggattaccatatgcagttagaagtgctaatttgaatagtggtggtggaggtactactggaagtttagcatctgataacccattccttgcaagtcttggaattgatgaatcttctgcagataataataataataataataataacaataatcaaataactaatcttagtaatgaaggtggatatgatgataatacgatgttaagtttacctgatcaaacacaacaactgatgttattagaggaacaagataatagatatgttcaagaacgtaagtcaagcagttgatgcaattgagagtacaattaatgaagttggaggattatttcaacaattagctacaatggttcaagaacagggtgaagtaattcaacgtattgatgataatattgaagatgttagtttgaatattggaggtgctcaacgtgaacttatgaaatattataaaagtgttagtagtaatcgatggttgatgttaaaagtttttggtatacttattgtatttttccttctatgggttcttgtcagttagatgattatagctatgtgcatatgcatattgaatatctaatatctaatatctaatgtctataaagtagtactagtagtaataatagatcagtgtaattaaaatttgacgtcgatcgactcattactttaacattttgcgacgatgcgactattttttgtctatccagtaagagaagttgcaaatgaaatatttctgtgaggggatgattgtaattgtaaaatattaacatgaatcttagaggaagagaaatatctctgaataacttctccatttcaacaacacaatgttctctagagtcacccgtagtacaataattgcagcaagaggagctcgtatgaactcttcaaaagctattaatgcaactccaaaagttgcatcagttgaagttccagctcaagttaaaaatattacagatttaacaactaatggtaaacaattaacatccggtgcaccagctgaaatggcagtttcaggtaatagacttgtaagaatatacaaagaaactaaatatgcaacacaaaatggtaatagaaatagtcaattttggaaattagaatgggatattttaagtaaaggtaacagatgggaacatgatttaactggttatcaaagtactgcagattatttacaagctacaagattagattttaatgataaagaagaagctattagatttgccgaatcaaatggttgggattattatgtcactgaaccaaaggaaaaacgttttaaaaagaaagattattcttcaaatttctaccattcaaagggtcctttaaaacatattttcactaaataattgatatatattatactattatatttaacctttatatactctttattcttcaaaatacaaatatttattcattaattacatttttattattattatcattattaatattatgtcgtattttttttttctatacaaaagaatacaaagcatttatacatataaacatgaacatgaaatcgaataagttattctatttaagcagccatttgagcagcactatattgagcaataacttcttccatctttttacttaaaactttattttgtctaactcttaaatgaatttttgcactttctaatagtgcaattgtttgctttctatcttcagctgatctacataatctacatgctttttcaaaacattcaattgcaccattaggattttgcattaataaataaacttgacctaaacttgaccatgcaacttctgatttggaatcgattttaacagctttttctaaaatattttgacatgattggaaatcacttgtattttgataaataactgatttattaattaatggtaatgcaccaatattattacctggaattgcttcttgtaatttagttgcaatatcaaattgttttgaagcattttcaatatctcccttatcaaataaaatttcacctaaataatttggaatttctggtgataatgggaataaagttttagcattattaaacattgttaaacatgattcaatttcattgtgtctataagtaatacaagctaattgaatgtgagcataaacattatttggattcaatgcttttgccttttcaaaattagattgtgcctttgttaaatcaccaattaaataataaacttgaccataatgataatagatatttggatcttcaggattcattttaattgccttagtaaattcttgatctgctaaaacataatcacccttatcagctgcaattaatgctaaaacaacatgcattcttggtcttggagaaatttccaaagctttttcaacatattcctttgcattatcaaaagttttcaaaaatgagaaaatacccatatattcataagcaattgcaataatttttttatcagtttgatcatttgatgaattattattatcttcgaatcttttaattgattgatttaataaattatcagcattttcataaccttcatcagtatctttataaatttcatttaatgcagaaattaaatagtaagaaccagaatctttttcataattatttaaatctaaatctaaatcttccttaacgaatgcacctaaaaatgatgaaattgatgaagatgaaggtaaaactttggtaaatgagaatagacttcttgatttaatttatctgcatgttcagataaaactctagccataacactatcacttgatttatcatttaaaccaccataaattgataaagcagttaaatcaaatgcagcatcttcatatctacccatttcttcataaacgtgagctcttctgagtaaacatttagaataatctggtttaatttccaaagcacttgtagtatccttaacagcattttcataatcttttaaagcataataacaagcagatctattaccatagaaaatatgatcttttttacaatctaaagcatttgaataataaacaattgcagtatcatattgttttgccttaaaatattcattacccttttcctttaaagcaattgcccaatcatttttttcactttctgataaatttgataaaatttcaggtgtaatatttggtaatttagttgcttcattaattggataaactgaatttttactatcttcttcaacaatactaccattttcagttgatgatgcaccattgttagactttcccttctttttcttatttcttctcttcttctttgaactttcactatttgaagaatcatctgaattatttgaactactattagttttcatataatagataatacctgcaatagtaccaatacccaaaagggcagatacagctgactgcaaccttgttttgttgtacaaaggaagtcatttgtgggatatgttgtagaaagaaaataaaaaaaaagaagtaaacatcaattaaaccccattccaaaccatcaatccttcaaaaatattactaaactccaaattccagctgaaaatttataactctcactcctctcttattatattaataaagacttttccccgtcaacgaccatcaattttttttattattagaaaaatgaagtaaggtaagtaaaaaaataaacgttgcgagctatgtggatcgaacacatggcctccagatcttcagtctggcgctctcccactgagctaagcccgcaatagataaagtttaaaagtggtagataatccttgtcgacgctttttcacgtgacaagttttttgttttgcttgtttcactatgttatgcacaatcatggtgtgatttaaaatatttgaagagtgtacttttttgtctatttttacgctattatattcatcaggcatctaattaaaaaatatttttttcataatttgagaagattacacaaaaaaattgtttgagagttttgaagtgtttttacattattttgaattcccaatggaaaatcgacattttttggctataacagcatttaactggttaatttttaaagttttaaacaaatataccataattaacaatatttataaacaaagaaagtataagattagctcatttgtcaaattattgataacgcatggaataataaggctttaactactattataatactcttgtatttgaatcacattacactataatcatctatatacataaatactcaaaaatctaaacacatacccccataaacaaactaaaatgaaagatgtcagcttagttctaaatgcacaatcaaaaaatttcgtgatgcacagcttcatgaatttttgcacttgattaaaaattatcaaatttcactttttcttaacagattataaacacctgatttctttctaaaaacaaccaatggcactaggaaatataccgaaaaacactcgtcttgaaacactgattaattttaaagtacgtgtgacaacctcaaattcttcaacttttgtgggaacacttacatcttatgataaatttatgaatttagttttaactgaatgtgaagaatttcgtattcaaaagaaatctaaaaaatatttaaatgaaattaaaaatgaagaaattgatttatctaaaataaaggaacagaaaagattacttggtttaattattttaagaggtgaaaatataataagtgttgtcgcagaggcagctccaaatatgaatactttgaaaccccagttacgattgaagaagagtaatgtggcaattaaaccattaaagaaaaaattaaattcagaaaaaccaccttcaagtacaaatggtggtgttcataaacctagacgttaaatcacctatatatcaccaatataaatttttgtatactacctactactattaataaaattaagatctattaattttttaatattgatacataaaatcttacatattcagtttctataagtaaagtgatgcacagaagacaatatcacgcttaatcttttcttgagcttctgtcatcttggaatgtaatgctgaatcacctgtaattaatgcagcatttctaacttggttacatatttcatctaagaaagtaataactctaacaatagtaccttcagattcatctgcatcgttaacaaattccataatatccttgaaacttctacctctggcccattcgtaaatagtattaactaatgcaaatctatcattctctaaaaatgtctcttcttcatttgttaattgaatttccatttcagttgataaaaccataactctttcaacaattgaacaaatcttctcctttccccttctctaatcttggagttgataatttagttggttcttcatcatcttttttacctcttttaccttcaaagacaaaacacgaaagtagtgcaacaatttcttcggaactgaatccacctaagaaattttcgaaaaactaattcagtaataattaattcccatccacaattaacttcacacgcaactctaccctttaaattaatagtcaattgttctggattaacataatcaagttttttcaatacttccagtcttttattatattcaggtaaaagttctaaattttcctcacttaaagatctctttaaatcatcaattttatcaactaattgcattctagttgaaaatttcaaataattatcatcctcatgaaattgtttaaaaatctcgttatctccaagtagtctacccaattgttgtaaattagccaaataagaacagcaatcactaatattagtttcattcatgaaactattcatgtccttttctttccaatggtttctcttgtttaataaaacttgtaaagagtcaaagaaaatcttaacagcctttgagccattattcatcaatgatttattgatttcaatatattcatgagccaaaaattcaatattttcacttggaactctaacaggtagaattttacgatttggattaattttccactttggataccattcagctaaaaacattgatcctaaaattggattaaagaataatccagcatcaattaatcttttaattttactagtatcattttctccggccacagaggcaaccaaacattcaatacaccctttataaaccgtgctagtagctattataccaacagttggaactccggattcatcacggaaaacaataagtctacctggtgttaacactttctttgcctttttaccactgataatagatgggaataaatttttcatcaataaccgtgtatcctttaatagggaataaatgttctcaaaagtttgtttcgtttcaacaggtaattccaattctttatgattactcaattccttttcaagtctgagaatttctaattgttgttctggtaacatggattgtgctgaattttcaccaaatgatcttttaatcatatcttcaactcttcaatgcttcaattcttaataaattcaaaatcattgtgtatgttaatctaaattgtgacgataatttggttaggaacacctaaggcaacttgctttaaactatttttatcagcaggttgttgatatgtcataatcataactgtaccaatcttatctaaacctctacgaccagctctacctgacatttgtgtgaattcaccaggtaataaatctctgaaacccattaccatcatgctttctaattgaactgaaatacaacagttctagttggtaagttaagacccattgcaaaagtttcagtagcaaataaaactttgactagagatttaggagaataaaatctcaacaacttctttaataataggtaataaaccaccatgatgaactgcaatacctcttttcaacatttctctcatccttaatatttgtggtaactctctatcttccttctttaatcttgaaactgctttatctatgaaacatatgaatctcagatgcttctctagcagttgaaaaattgaacccacttaaagtttctgcatattcttcacatcttttcttagaaaagacaaaaataacagccggtaataaatcattctttttgagatagtctaccaaagtaatccacgatttactagttggtgcatctcttttcataaaacggttaccattattgttattgttactaccaccacgtccacctctttgggccaaagcaccacgacccccacgacccccacggccgccacgaccactattattatttgcttctttattctcagcctttgatttcaaatacttatcagcatgttgattatatccagtttcaaggaaatttctgttagagtctattactttataaggagtatcctttgcaaataaaaatatttctaatggaactggtctcttaggagttgaaataacgtaaatatctttttgctttgttctaccaacccatgatgcaaattccaaagtatttggaacagttgcagaaagcaagatgattttaacatgttcgggtaacatgataataacttcttcccaaacgacacctctatcaacatcattaacataatgaacttcatcaaaaataacaaactcgacatctctgataacatcagaacctctatataacatcgaacgtaaaatttctgtagtcataattaaacaatttgcatctggattaatctgaacatcaccagtaataacaccaacatcaatttctttgaaagtatgtttaaaatctctaaatttttgattacttaaagccttgattggggatgtataaattgccttagtcatattattatgagccatcgcaatcgcatattcagcaacaacggttttaccagctgatgtatgcgcagcgacgaaaacggaatcaccttgttctaaatgataaactgcttcctgttggaaaatatccaattcaaatggccaagttctagcagggttagggatgatttcatcaaaattttcaattttatggttaagatcaacgacatgtgcccaattagtttttcttttctgttggtttaacaatgtaccagagacagttgaaggtctaataattgtatcttttggaatgagctgagaaatttccgtatccatttcatcatcattatcatcaacactactagcggaatcttcattgttttcggattcagtattcattatatcatcattactattatcatctaattcttccgctaatatattcatttcatccgattgtgtatttttaagaatttgtaaatctgcttcattactatcatcatcgttatcgtcatctgcaccaccaaaagctctcaaccctcttgaaaaaccttgtggaatatcataaagaccgtatttgtccttatgtaaatatttcactgcattattatgtgaagtattggtattatcagttgaatccaatccaccaggtaaaaatggtaaatttgcggtagatcccttaacattcaactttgaatcacctgtaaattttctattaaaggacaaggaggattgtgaactactattttcagtcaattcaattgcaaaatcctctgatgatgacacaacatcaccattgattcctgatcttttaaaccttattgtagttctattcaataaatcaggtaattttaatagagatgcattcaattctgactctttctcatctgaaacattaggctttccactgaattgatcaagtaaactccaaggtaattgatcacttggtgttaaatatttatctattaatcctttggtatctgtatctctattaagattaaaactgcctttttcggtacctgtgattcccaaatctgcaagaacagattccggatcccaaccatcgtcactcatgtctagttgtctgtgtctgtaccttttaatacctctcccaacatcattcagagccttcaaattcaagtaacccatagtaaaacactaaaaattgccatcccccgtgcaccacccaaaaatcccacactataaaatttgaaattgccctttaatccacacgattttccccccacactgttaagtgactgaaatttaaagagagggttctgggtacatgaatattatatattgtggtgctacttttatcataactgattcattctgtaaagaagttctaatacacaatttatcagtagctttgctcacaaataattccgaaatacaacgcatataatattaacattaatattaatacatttacctgaatatacattaacataataatcaatcaaacttcacattcccaattaaaatcacaatgggtcacgttacaatagcagattcaactccagttaaattatgcgtggttatagtaggattgccagctaggggctaaatcatttatatctcagaaaattgtacgttatctttcttggctttcaataccgaccgaatctttcaattgtgcagctaatttactgaaaattttagataaatcaaatactacttcgaatgaacttttcacttcagatgtatcgaatattaatgatgatttattagttgaaaatagaaaacaaactcttaatcaaatactgaaatggtttgataatatagatgtttgtggtgttgcaatttatgatggtattaacggtacaagagatgaacgtaacgcaattgaaaagagtttaaaagaacaaaatattgatactgtattccttgaatcttattgtgatgatgaaacaattattaaatcaaatatcactgatattgaatcaacatctccagaatattcaacgtccaaatcaatggaagatacttttaattcagtttcaaataaaattcatttctataataatgcatatcaatcattatcaacaactgaggaagcagatttatcatttattaaattaattaatttctcatctcaaattgtgttaaatcatattgattcatatttaaaatctcgtatagtttattatattatgaatttacatgtcaaaaatagatatatttggctgtcaagacatggtgaatctcagtataatttagaaggcaaaattggtggtgatgcaaaattaagtccaagaggtgaaaaatactcagttaaattagtcgagttagttaacaaatatataccaaatcactgataaattagaagtttggacttcaactttgaagagaactcaacaaactgctcaatttttaccattccctcagaaacaatggaaagcattggatgaactagatgcagggttcttgtgacggtttaacttatgaagaaatagctgttaaatttcctgaagattttaaagcaagagatgataataaatttgagtacagatatccaggtggcgaatcttatagagacgttattacaagactagaaccaattattatggctttagaaaatcaagaaaatgtattggttataactcatcaagcagttcttagatgcatctatgcttattttatgaatgttcatcaagaagaaagtccttggatgagtatacctctacacactttgataagacttgaaattaaagcctatggaactcaagttactagaattaaagctgatatacccgctgtctcaacttataaagaaagaggtacatccaaactgggcgaatctaaaaacagtattaatgttatgagtggctctgtaattagtggtataactgataaagtaattaaatgaatttgcgtttttttaattggatttttactcttatataatgtttatatcttatgtttatgtagtttcaagaagttttaatggattggaaactgtttcgatttactaacttaaatttattcaattacaaaacactatacacttgaaataaagaagatttattttacatattatatcttaaatgtaatttgattgattatcaagatcaaattcactattattttcaagctcaagattaagttcactcagtgcctttaaattctttttaataaatttggacttatcatctccaaaccaatcatcaataaatagatatttttccctatatttagaacttatacttcttttcattaaatgccaatatatccttacataagatattacagcatattcaccattaattctaacctctcttgatgcacatgaattcagtgtgaataaaataaatagtgcaactaaatcaaaaaataaaatatgaattaattcaattactattggtagcttttcaagtgcaaaaagtgttgtaacaacaataattgcacttaaatttaaaatcattgacatcatcatcaaaatattaaagcctctataacaaaaattacaagataaaagaaagtcaatctttttaatgaattccatctcttcatcagtaaattcgtacttttttccttcaaatttataatctaagaattctgctaaaggttttaatcttggaacccagtatccgccgcttttacttgggaatcttagttttgaatttttagagaaatctcttttcgatgactgtgtcggctttttaaatgttaattcataaggaacttctgattcatcagatgattctgtatattcattgtaaacacctgaacttatacatgaatttatattatatgcaatttcaatattatcttcaagtgtttttctcttatccataatcatattttcatgtaatccaagttcccttttctttctatcaattgtagtatctgcaaatgtcatatctaattttttattagctggatatacaggaaaatgattgttttgagattttaaactattgcttttatgtgttgaaatagatcctctattgcttttattgtgtttaggactatttttatgtgatgcctgaccaccgctttcatcagatgatgattgcaaaatattctgcattttctgagcttcaagatcaaaagtgctattattgataccatcattgaccgagttaccatgagtatctccattgtccattatatcagcttcataattttcaggcggtaagttaggatcttcaacaaatgctgaaagtgtagagctattatcaaataacatagcagtttgcaaccaagcagttacacctttattttctgaaataatactaagtcttggagcactatatcttttttcacgtggagattgaccagatgatagatcattatcactacttccactacgaccaccatcatctatatcagtatcagccatacccatgggtgaatattggctagaattattagtattattataactaccttgattcaaagatcttctaggagagttgttgttcgatctgctaccactaagataacttgcaatactacctctatgttttgattgaggtgataagttattattatttgttaaactttgtccacttttatatgtctcataagaaatttgactttgattcttttgaaaatatatcgaagacctttgtgttttttcactgtcaattcctgatttattgtcttggatttgcatttccttttgtgtagttttctcttgctctgtttcttcagcgctttccgcatttgccgttgagtcttgcgtccacgacatcgggtctgctcttgcatcacaggtttgtaatatctgtaaagatattcttccgtctcgaattgttgaatccattgttggagtttgggtatcatcttcaagcttagactttgggctgtccgacaacgacgaattaggatgtattctaaccatcttaatatgtggtaattaaaaccaaaataaaggtttttgactttttctttgaacagtgtataatattatctttaattcaaagaaagaaaaattattgatagctttgcaatagcagtagtttttttgataacgataacaagaacttaaccacaagatatgtcaagcaaagatatataacacgtctatactaaagcgtacagatagctgtgccacttaaactgtaaaagttgtacaacacaaacgaacaacactgagctgttaaagaggcagtctgaaaaaataataatttatgggtaacccaatgaaggggcaaaatgttttatttcctaaaggggtaatttttgagattccccatacattattcccaaatgattaacaattttcatgttgataatacgtttaagcaatggttaatgtattgtacatgctgttatgggagtgtatctgagggaatggatggtttttaaactctaagaaggtggtcattacaccttaatctaatggtaatcaaaaatatatcatttcatttaaaaagttacgtaatcaggtacagctactgtattggtggttcagataaataaattgtacttttaatggatataaaacaatatctctgataaattttctatatggatatatacaaggttatgacaaaagcaagtatcatgatctttgaatgcttatattacaattttgatgaaaaatcttttctattctatcttttctattttctagttaatctcattgaattttccttatgaatacctttaacagctttccaaagaccatcaacttcttgttctgttggccatccagaacctgcccatctaatcttataagagtcatcaacgagataaacataaccagaatatgcattagtcattaaaagtttttcacgatcatctcttgataagacattatctcttctagcaattaaatatctatcatgttgttcctttggtctttgttctaaaagtttaccaggtgtaacaaatgtatgaataaaatgttttgaagcattttcacttaacacaatttctacaatttgagtatttgggaattcttgattaaatacttcaataccattctctgacatataattatcttcactatttttaattttaaaataatcattagtcatttcaaaacctgcatcagttgaataaacacgtaatatacttaattttttttgatctaaaacatccattaaatccattcttttacctgttaatgatttaactctaaaatttggaaaatatagtgatttatctctacggaagaaagaaattggtgattcaaacaatctaccctttgtctttgtataaacatggaaatcatacataccaccataagccaaatctttttgaattgcttcaactctagttcttcttgtgacaccatcaaaatagaagtcccataatcttttaggaaaatttaaattttgtgctgtgaaaattgggcttgaatccttatcttgtaatcttagaggtggtttagcaaatccgaatggtttggaaattttaaaatatttatgaggtttgggcacaattttagccatactttgccctaagttaccaaaaaaccctgcatttcttacaaatgtacgtggacctagttgtgatattctagacatgtatgataatccaataccttttgttaagtcacaaaagatcaaagaagagttaagttaaagaaacctaaatatagtaaaatcatgaaaataagaaaaaatgaaaaatgttaatgccttagcaaagtgactgaatgtaaataggaaaattatgataaggatttgtaaatatcaaatttcactcttttcttaacactatttctttatctttttctcttttttagtagacaagtaggtaaaatatggatataaagaagatattcaataagaaaaagaagactaatgaagtatcttcttcttcagtacaaggttcgtcaagggaaagatcaagttttgatggtaaattaagtaacattgataaaaatatcaatgaaaacttagaatcatctaatgacaataaaagtttccaatattcatattattccaactctaactctctattcagttctaaacgtacattatctactgctggatcatcacaggcaagttctaataataattcttcatttaatagatcatcaggtaaaaaatttacaagtattggacgtccattacagatattaaatgaggatgttcaggaagatgaaagggaatatgaggattataatacggaagatattaatgaagttgaagatacgaatcatgatgaaattatgaaatttgaaaataatcctattgaggaatcacataatgataattttgaagaagatgaagcagtagatgaaaagatggattatggaaatcaagaacttgatgaaagttcatctaagatgcaatcatcatctcctatattaaacagattcaaatttactaatgcttcacataataattctcaaaataaagtaccatccattgatttatcatcaattaaaacttccaaaactgctgaaacattaaatcaaatgaatgaatttatcaaaagtcaacttagaaacttaagctattcaatgactaatattatgatacaaatttcacaatctgttattaatttaactaaagcatcaataatgattactgaatgtatgaattcaatatataggacaattaaaagttataaaaatattgatatattagagagggatcaatttaatacaataaattctataggtttaagaagaataatcaaaatgtgtcttaatttaattgataatttattagttggcgatgtttataataaatccaaatccttgattttaaaacatctctatgatcttttgaaattaattaaaattgtaccaaatgaatcacattcattaactaattttattacatttatgtcaccaaaagtattcccaattgattttaatataagtaaattagcaagttttgataaagttgataatataatgaataaaatattatctaaggaggataatagtatttttgaagatcaagaaggttcatttattgcacctgtttgtagaggatttttcacatcatcattaagtgttgttacatttatatttggatttcctaaattaactaaggaacatcaagatgttatcaaatcatttggaacaaaaatgaatgaatttcattttatgttacaaaaaaataaaattttatccggtagtatgaataaggaacaaatgaaatttaagatgccatttagaactatcaaggatgatcaagaatatataccaatctcaatgtcattatcatcagattatgcaagtatttcaagtggtacattaggtggttatttatatccaaaagtttcaaataattgtatgaatccaaaaatcttaaaatatagaggtaacgtttttggattaacatgtgcacatgttgttttgaataatgacagagagaatgaagatgttaataaagagaaagataaggaagatgctgacgaggacgaagacgatgatgatgatcaagacaatgaaggaattgttaaatcagagaaaaagaataagaattcacatccaaatatatcgattccatcaagtgttttaattaatctctataagagagcattagttcatgagatgaagaatcattcaacctaaaacaccagaatataaagtatatcatgatacagtttcaatgattgacgaggaattccctatacgaaagatacgtataaatgataagaagatagtttttaaaaatttacctaaaaataattttggtagtatagtatggggagagagaatgattaatatgaatagattaagtgatatggcaattatcaaaataagtgatgaagtgaagggtaagaaatatattaattatcttggagaggatttacaattatcacaatatgatccatcattaatattatccaatttaaatattaaatgtacagttagtttacaaccacgtaagaatgggattttaaataattctaatttagaagttttcaaagtgggtagtacaactggatatactaggggtaaaattaatggtatgaagatgatttattggtccgatggatcattacgtagttctgaatttattatatcaaatggagatggtaaaatggaaggatttgcctaatggaggagattcaggtgcatggatattaagtaaagtaagtgatgttaataaaatacgtagaagatataatgaaatattttctgatgaagaaggtggtaacaataatggtgatgaatttgggaattataatgatagtagtgaagaagatgaagattatgatgaagaagaagatgatgaagaagaggatgagaatactaaggcatataaatccagtttaacatcatatattgaaagttttataccaaagattagagttaggaaatctaagcaaagaaaaaataagaagaagaatagaagaaataaaggggaaggtaataatgataatgaagaatatgagaatagtattgatgatgataatgagaatgattttgataatgaaatgggattaggagttttaggtatgttacattcatatgatggagaatataaacaatttggattatttacaacaattgatgatatattagatagattagagaatgttacaggaattgaatggggagttgttggatgtaatgaagataaagattttgatgttttcagtaataatagtatggaaagtaaatcaaggacaattataagtgaaacaataagcgataaagatattgaatagacagtgaatagttttctttttataatttagattgtattataataaataaatttgaaaaatatagaatatagaagatgtataaataaattgattaagattgagcagcttcaggatcaacttctttaatccaatgattaccaataactgggattttttcatagaaagttttttggaataaaggccagttttcagtaaaagtagcaagagctgcaccacctgcaacaccccagacagttaagacaggaatgtaagagatgatacttttaacatgataaccaccaaaggtagcagcattcttaaggacaggaccagaaacgtactattggaaagtaaaaacaaaagaggtaatatgttagtatatgaagttatgattgtattactgaacctatatttatacttacagccattgtgtgtttgataaaatgaaatgaaattgatactttaactatatggtcttttataaaaattatgaaaatatcaagtaaattgcatgttagtagtagtttgaaaaacagcagtgattacagtaaggattattataatataaatttgattggttgataaattattgagatggtaaatacagaagacgcgtctattacaccaaatgattacataagcaaaacacagacgcgacttacaaccagacccggtgagaccggaaagtatttccctccttccccttccctcggaatagaatattgagaaagttcctagtataaatactccccccacagataaaagataaaagataaaaaagataaaaaagataaagaaaagctccccgcggaagataaggactgtgagcttttgacagtgtgtcaaagtagcagtatcaatgttaaataaatttgggttcatttcccttgttttcaatgttttcttttatctttttcttactttactttactttctctaaggaacaatgactcaattcactactttatgtcactctgaacaacgttatactgcttattatggtactttcgctcatactccaaagttaggtaatttagaggtcttaccaaatactcttttaggtgttgaatagtaactggtatgatagattttataatatcggttgagcctccaattgaaaattgaaaatgaaattgaaattgaaaatttaaaatctttagttaataaataattcttccattaaactatctcctaataatattgatataatttcaattgttgataatgttaatagtttcttcttcccaggttttattgatactcatattcatgcacctcaattcccaaataatggtattttcggcaattcaactttacttgattggttagaaacttatactttccctttggaatcttcattcaaagatttagaaattgctgaaaatatttatactaaagtagttaatagaactttaatgaatggtacaacaactgcttcttattatgcaacaattcatacaaatgcaactaatttattagctgatctttgccttaaattaggtcaaagagcttttattggtaaagtttgtatgaatcaaaattctcctgatcattatattgaaacttttgatcaatgtaaagaatcaactttaaatgttattaatcatattaaaaaaatgaatccaactggtgatttaattaatccagttataactccaagatttgcaggttcatgtacctgatgatttattaaaatggttaggtgaattacgtaaaaagggtgattatcattgtcaaactcatcttagtgaaaatcataaagaaattgaatggattacaaatatgtttcctcaatataaacattatactgatatttatcatcaaaataatttattaagttcaaagacaactttagctcattgtattcatttaagtgatgaagaaatgaatattttaaaattaacaaattcaggtgtaagtcattgtccaacttcaaattcttcaattacttcaggtgaagctaaaattagatggttattaaataataatattaatgttagtttaggtactgattgttctggtggatttacaccttcaattttagaagttgctaaacatgctttattagtttcaagacatttagttatgaaatcttcaaatgatgatgaaaaattatcttcagctgatgtactttatcttgcaacgatgggtggtgcaaaagttttaaatattgataataatgttggttgttttaagaaaggtatgaaattcgattgtctacaaattaatcttaattctaaaaattcaaatattgatacttttgaatttcaaaatcctaattggtcattaaataatagtattgataaatttaaagatttaatagataaatggttatttaatggtgatgatagaaatattgaaagagtttgggttaatggtcgttgtataattaataaatagtagtataacttatataacataaataataattataatattctaatgataacataaactatacaatattgggaaatttttatacttttcttgccaatccgttataacatcctctatttgatcttcccaaatttgatatttttcaacattttcaatactttccttatataaattacttaaattatttgctaattctaaaattgctttaccacctaattgtgcactttcatgatcatcacgaatttcaacattaaatacatgaactttattattaatttccattggatcaaaataatttctagctaaaaaatcttcaacaacattatcaaaacatctctcttcacaagttattacaatttcaaaatctaattcattttggaaaccctggatgttcatcttcaggtaatttttgtggtggttgattaaaatatggccaacgttcaggtgctttcttaatattcatattacgtactgtcatctctaaaactccattatttttatgaactttaataccttggccctccaaaactttcattatttcagtatatggtgtaccaaatgggaaaacattaggtttattaattgatggtccaggtaatctaactgcagatcctgtaccatatgatctaactgtatatcctgcatctcttaatactttatgtgcttccatcgaacgattattattagatgcacatactgtacaaaaccttaaatcttgtctatcatccatatttgtgtatatattgtaacgtttgatatcaaaagaaagtatagatgttaaaatttatagtgaaaatattgaattttggaaaatactgaaaattcatgcactctctcaaatttccatgttttttgttatcagtggattttaactttggatccacactttcatttaccaaggactgacaaagatatatgcaagtaccaattataatactattattattcacatgggtagtctctgcgaatgtatcagatacaccatcgtttcaaagttttaatgattggaagaaagataaattaagtgatgataacaatcgtcaacatcatactggtagtggtggtagtaaaatattaaattctccaatacgacaaaatcgtatgaaaacaagatcaaataatgagaatgctggtggcgatgataatgatgaggaacatattggtgaaatgatgattgaattatcaatgtttacaggtgaaaacgatgataataataataataatgtcaataatgataaaacaggattagggaaagggattattgagaaagatattcaagatgatgggaaattatataaggatagatttaattttgcatcatttgattgtgctgcaactataattaagacaaataaggaagccaaaggtgcaaatgctgtccttttagataataaagattcatatttattaaatgaatgttcagcaattaataaatttattataattgaattatgtgaagatatattagttgatgaagtattaattgcaaattatgaattttattcaagtatgtttaaagaaattagaattagtgcaagtgatagattcccagttaatcaatggataattttaggtgaatttacatctgaaaatgttaggaaattacaaaattttaaaatcaataatccaattatttggacaaaatttttaagaattgaattcttatcacattatggtgatgaattttattgtccaatttcatcaattcaagttcatggtaagacaatgattgaacagttgaaagaagaagaagaggaatctgtaagtgatgaagaagagaaaatagagggtggtataattgaaagaggcccattaattaattttgaaattaatcaaactgaaatgggaaattccaatgataaggataacaatgaaactaatttgttgaagaaaacaccaatatttgatgttgatttatttaatagtacatggatatcatgtattgaaattaatgatacaatgaaaacaaattgttcaacaccgaaatatcttaaacttgatgaatttttaaaagattatgagaaacgtaatgctgaatatggacaatgttttgataacaatactaataataataataatgatttaacaacaacgatattaccatcaattaaaccacaagattctatttataaaaatattgttaaaagattaaatttattagaatccaatgcaacattatcattactatatattgaggaacaatctaaattattaagtgaatcatttataaatttagagaataatcaaaatattaaatttcaaaatattcttcatcaacttaattcaacgattcaaaatcaaatgaatacatttgataaattaaatactgatgtttataatagttttgcaaaattatttgaatttcaacaacaaaattttgataatactaataatgaaattaataaagaattaaaagatttgaaaagatcaatttggatttacagaaatttaacaattttgacaattttattagttataacagttatttcatataaaataattactagagatattataattttcaatgataaagaatggaatttcccaacttcaccagattattcaccgtcagtatcaccaataatttcaagaaaatcatcagttgctaaaatttttaagaatgataaacataagtatcctaataaaccggtgttagatgatattaataatgatgatgcagagatattatttgaagaataattgaaagtatgttcactattagtggtaatagtagacaacgtttttattaatttcaaattattaacattaattagagtttttttttatatattattatagtttataaagaagaaaaaagatagtttataaagattagaaaagtaagtaagttataatgtaatgtagtgtaaaagtctatgttctatgttctatgtttaatgtgttctatgctgtatgttttgtcatattaatttttctttataatcgtttaataatgaaaattcgttatttgaataagaagtatttgaagaaattgatgaaaatgaggaaaaatttgaaggtgaatcacaaggagttgtaaagattgaatctgatgaagaaattaatgaataatctctaaaattgtttaaatttgatacattgaaagaacaagattcatcaaatgctaataaaaggtttgataattcaaaacaataaggattatgtaattgaataactgattcaatttcatttgattcattattagaatttggaattgtagtttcaataattgataaatcaatttgatataattcattttcttcaataaattttttaacaactgcaataacacctaatggagtatatttctcaattaatacttcagaaggatttaataatgatttaaataattcaattgtaattttacgtatttcattaattgtatcaataccattaaaacctgaaatgaaaggaccaaataatttattatcatcatcattatcaattttattattattattattattattactattattgttcttggtattattatcattatcattaatataagattcaaaattttgataaatattattcaagaaattagagccaacattcatatttagtattgaacaagccattaaaaatgaagatataccaattaatgaagttgaataatttaagaaatttcttttatataatgataattcacataaatatcttgaaactgctaaaattgctgaaacggttggagtattacccttatataaatgtaaaggtttatttagtaattctttaccatcaggatcactaaattttacagccagctgtaaaatatcttctaaagttgtatgaccaattgaccaatttaaagtacttaaaatatgaatttccatttctttaaacattgaatcatcataaacatttgaacacattgtatttaattctttaatatttggaactcttgattttttatcttcatattttgaaggcaatccataatgaagtacaaccaattaattgataatgttgtttaaatgcaattcttttagcacaagtatctatcaattatattccaacaaaggaataaagtttgaggttttaatctaagagatgaatgcatttgaattatgaaatttactaaataaggtctcatataccatttaacttcaggttgtaaatcaatcattgaaggattaattgaagatgatgattcaagatatttaaaatgttcattaattgaaggtaaatattctgcagttattaatttatttttaaaattttcaattgattctaatttagttgaataaggttttgtaattggtcttcttggaggaccataagattttcttgatggaataggaattgaagattgatttgaagctgatatagttgattgcattgtaaaattttattattaatttttattaatattaatattattgctattattagggtataagttatataagtgaatatatgagggtatcaaaaatgttatttgttttgtgctgaatgtggggggattatagcaattgaatgtataataaatatagtaataattaaattaaataattatctctatgaaaggaattgaccaagggggatgatatagtaaacctgtggggtggttgaaaaatgtatgaacagataaacttgtgtataagtagaagatgacctatagatataagtataaatataattctaattataagttgaagaaagtagtggttatttaattcagatagttaataaataataaaatcaaggaatagcagaccataatataggaaagattaaataattaatcaagaatatagtacaaaaagtaacataatattaataaaatgattgttagagttaataacaatataaaatcgtaaataatacaatgtcaatgagaaggtaacagtaatagcaacctgattataataatagacctttgaggtggataaattggtcacattggtagaaaacaactccttctctcaacggtgaacgcggttttgataagaaattagtgagtttttcaccgccaaacgcgcttggcaagggtactagtagattttaagttttcgccttagcgtgtttttggcaaattagtacgcttttcgcagggcgcgtttgtttatcttttgtttacgttttgtttacgtaacacgtttttggtttgcgttttgtttaccttttgcctctttagagttatcgcgttttttggaattttatattttttttcactttcattgatgtagacgcatcgtcgtattgttacgtaataacattacttacgtaatatttactcacgtgactgattacgtaatgattgtaaaaatatcaaaataaagaaaatttaagggtaaatttccccacaatcccgataagaccgagaatcatattaattgccattgcatcgaatccattcattcgcatatagccatttttcttttcaatttattaatcattttcctattgtcttttgaaattctatttcattttaatactgtaaattaatattgtataattttcgtgttcctaaataccctttgctttttttgaccctgaattttcgattcgatgtgaagataatttcaatcatttttttcttgcatttttgcttattaaaaatctatgtactaataaaataatcatttcaacaaatcaaaaaatcaataccataaatagataaatagataaatttcataaacacaaaattatatgtcaaaaaacgataatgataaaaatatttttttccattcagattcatttgaattatgtgaacaagatcgatggttaccaattgcaaatgttgatagagttatgagattatgtttacctgaaaatgctaaaatttcgaaagaagcaaaggaatgtatgcaagaatgtgttagtgaatttatttcatttataacaagtcaagcagctgaaaaatgttcaattgaaaaacgtaaaactcttaatggtgaagatattttatatgctcttttttcattaggttttgaaaattatgctgaagttttaagaatttatcttgctaaatatagagtttttgaattagatgaagttgaaaagagaaggttaaaatatttagctaggaaagaaaaattaaaatgtgataaggttaaaatagttaaacctaaaattgataataataaacctacaaaacctgcaattataaatgatattttaagacaccctccattaagtgtttatgaattattatctacaaataatgctaatgaaattaataataatgaaattaataataatgaaattaatagtaatagtaatagtaatactaatattaataataacataaacaataatattttacagcaaaattcatttcaaggcattgatgaagaaatggatgatgaaatagatcaagatataagtcaagatataagtcaagatatagatcaagatattgatcaagatataagtcaagatatgtattggtcactccaacgatctgatatgccactgaaggtacttattgatgatcaacagatagatagcataatgcaagaatcttccatcgaggaaaagattcatcttaattataacaaatggggcaaaataatacttaataattttttactactttactttactttcctttactttttctatagactcttataataatgaacatactatatcttttgatgatagcacaaataatatctgctcaaacactgattattcaattaactgaaaatacaattggtttgaaatttttgaaaaaatatgatacaattcttaaattatgctcttatgaatatttagagatttcaaataataaatttcttattgggaaatttgatactaatttcctcaaatcaatttattttgatactgaagttaaatcaattagtaaagataatcaattaaatatttgtcaattgaagaaaaaaaatgatttaagttatgaaagcaataacaattatataatgaaacccatacttgaacaatcatcacttataaacaccaaacctaaggatacatcaccattagttcaacattttgccccaagacatttagttagattaacacaagatcatgcaattaaaaaaaagcaagaaatgaattttaaatttccttcatcatcacctgataggaacaacaatcataatatctatctacttgatacaggagtagcaacaacacacccaggattttatcataaaaaaattattaataagacaataatgaagtataattttacccataatttaaataatgaagatattaatggtcatggtacatcaattgcatcaattatactatcacaattattaggagtttgtaaaaatgactgtagtattataagttataagataattgatgatgatggagttggatatttaagtaatcttattaaaaccttaaaatatattcaagataatgaaactaatgggatattattattaccatttataagtgagaaaagtcaaataataaatgatttaatgtatacattcaatcaacaattgaattatactatagttgtgccagctggaaattatcaactggattcatgtaattattcaccaagtagttcaaatgatgtaattacagttggatcaattgattcaacgttagataaaatagctgatttttctaattatggtaaatgtattaatatatttgccgatggtgttaatatgttaacattatcaaataatattaatgataatataccatttgatatatttagtggtacatcattaagtgcaggtattgttgcaggagttttaagtcaatggttaaataactatgatgaaattaattttgatagtaataatgatttaattaaaaattggataatttagcaagtaaaggtattattcaaccaaataaatatttagagaatagtaaaactgttaataaacttattcaaatgatataaaaaatgaagaacatggatagctggtgtagctgcatgtaatattatcgttttataattggtagccaaattttttcaatttctcacacacagtgagaagaaaaatacatgtcaaaaatgcaccttaaaattctcacactgacatgaaacagtggctattagtagaatattcatttagtgtatagtactatatatagagacatgtttgactatttacaagtgcagtaatgaatgtctgtatatatttatatatgattttcatatagtaaaggaaaatgaaattaaatttagtacttgataatgttgtattacaatcaactggtgttgaagcaatttatgatgatataacaactactataaccagtacaattacagaaactagtacattatactatgaagctattccaacattgataaaaagggcacctgcaatgtcaacaattacatcaatacctattagtactagtactagtagtagtagtaatacatttgataattctaagagtagtggtaaagcagttgcaatagcggtacctattatagcaattatgatgatattcatagcaattataattgtatggaatgttagaagaagaagaggttatgatagtgaaaataatgatgatgatgaaatgtatgttagtagtgaagaagatgaaaaggaagttagagataatatacataattttactaaagttaatataattccaccatcctacagccacatcctttgcatcagtgtctaatacaataccatggaataagagtgtaagagatacatcaccgtttatcacactaccaagtgagagagatattgctatgctaaagactaataaagtagacattacgtaatacatttttctgtaaaacatgaaaaaattggaaaattgaaaaattggaaatgagaaacagggcaaattaaaattaaaattaaatttaatttaacgtccataatacactacttatatattattattgatgattattgatggttattattattgatgattatatgcttttcttcttttgaagtttttctttaatttgtttgttgtttgtttgttagtgtttacatcttatatactgtctatataatatattactcatcacatcttcaactatcccactattgtcactcctttactaagtaatataatataataccaccatataaattataattataatgcaaaaattaagagtattctcaaaatcacattcaaaggataaagaaaaatcgaagagaatatcatccgatatctcatctccaaaacctgatttccaatctaatttctcatcatcatcatcatcatcatcatctccttctttattaaattcaaatattactgatgaatcaaatggtaaattaagtcctgaattagctccaattgtttcactgttatctgctcaatctcatagaaaatatattgaaggtgttttcatgttattaaaagatttaaattcagatggtgaaccagctgaacgtaaatggcttgaagtttatggtataatgattggtaatgaattagcttattggaattcaaatcaattagaaaatgaatcaaatagttcaattattttagctgataataaaccttcttatttaaatttttcagatggtacttttaaaccttgtatttctttaccttcttcaaatggttcaattaataatgttattgtcttatcaactactcttaaaaatagattcttattacaatttcaatcggataatgaatttaattcttggtgttgtgcctttagattatcttcatttgaatataaatctttacaagaagcttatactgcttcattattaagtacaagaggttccctattatcagatattagagttatcttatctgataataaaaaatttaattatgaagattgggtaagtgttagatttggttctggtatgccttggaaaagatgttttgcagttattgaaccaagtaaaaattcaaaaaagaaaaataaaaatggtttaatttatttttatgaaaatgaaaaacaatcaaaaaaattattaatggctaaaatcactaatataacttctgtttatgctctttatccaagaaattatacaatgattgataaaagtactttaattaaactggatggttcaattcaatttgataaaaaggatagttcaaataattgttcaatttttttaatgccagaacaacatacttcagttcctggttatgatactttaataagatttttattaccaatgatggattcatttaatttatatggtagacctaaaagattaaatgctaataaaaatgatattgattcattattatttggtttaccctgttttaccaaatgttcattatcttaatgttgatgatttattatcaattattaaaaataaaaattcattagattgggatcaaaatgaatggaatttaaatattaaaaatattttacaaaataaattgaaaaatggttatacaggttgtggttcaaatgatggtattaatggtgctgttgatatattaaattcttcaaaagatatggctgatggtaaaattaaatttttcattaataaacctgaagctaataaatatttagaaaatagtcctcatgctaaaagtttaaatattaattcaagtgaagaagttagtacaattgatcacgtatctaattctaatcatactaatatataataatagtaaaattaatattaatattcaaaatgattcactttattcaccacaaaaatcaaatgatgttcattcaactcctcaaaatgattcaacttttatatcaaataattcaccttctcctcaagttgttaatatttatcaaaaatattcacaaattcctccaaatgatgatataataaatgatgaaaatgaaaatataaatcaaaacatacctcaattatctaataacatgaatcaattaacacttgataatttacctaaaaaacaaattaaaaagaattcaacagttgatgatttctatccaacaaatgaagatgaagataatgaagatgatgattatgatgatgatcaacgaggttttagaccagaaagtgatgatgatgatgacgaagatgatgacggatgatgatgaagattttgcattcaaaactccaggtcgtactaatggggatgaacgtatattttcaccatttacagatttcaataataatttcagggatgcaattcaaatgaagcagacatcaccattaaaaaacaatcaaatttctcaaccaataaataataattctaatttatcattaaatttacctaagcaaagaactaaggaagtttcaaataataattcaaatgatttttatccttctgaagcacttagtgagagtaaaaaagttgaaggtgttaatagatatttttctactccaacaaaggaaaatgaaagacctgtatttgataacaaacgtgctccatttgataacatagtcaaacaacatgctaattataagaataatcaaaatgtcaatacaaatgataatttccaaactccaactaatccatataatataattacaaatgataatgaaatgatgagaccaataaagaaacaatatgatcaaaatgataatctgaatagtccaattaatggtattaatagaccaccaattccacctcaacatcaaaatttgaattatacaaatagtccagaattagttccaccccatcaatataaacaaaatcataataataacagtaatgaaggattgaataataataataatagtaataacaataataataataaacaatttaaaaatataaataataatccattagatagtccaaattctccatcattcggtgcatatggtccaatgaaactaccatcacctgcagtgaatggatcatcacaatttgcaagacaaaattatcaaccacaaatacaacctcaagtacaaccacaacatcaacaaccaaatcaacaacacaatcgtccaacaaataatcatcatcatcataattatccaccacaacaacagtatccaccacaacagcagtatccaccacaacaacaataccaacaacaatatccaaaccaatatccaccaccacctcaacaatatcaacaacaacaatcatatccaagacaaaattatggatataataattataatcaaggatataatagacaatatcccggaggaccaggtccaatcccaggtggaatgccaggtggtccaatgggagctccaatgggtggatttcctccaaatcaaggtcaaggtcaaggtcaaggtcaaatacccggtcaagctccatatggaataccaggtcaatatccgaaaagtaaaactcgtaggccaccaccaccaagttcaggtaaatcatttaaacatgatccatatgcgttaactaagaagtaagtgtgtaattattaaattattatgtattatatttaacaattaattaaaaataaggtaactttagtattattataaatttatttatatcagtatgtaaattatataaaaaataaaaaatctaacaagttttaacttcacgatcttcttcaattgacataacatttgaattattttccagagttgaaaaatgagttgatggtaatttaatttgataacctttaaagatatcaaattctttctctactgatgcattatcaattgattcaattgttttacgaaattcattttgatcacaagaatcttttaaaacaacaatataagattttaattcagtatcatttgcagcagtcattgtatttatttattcaggttaagtatacagaaagaaacaaaagaaacaggagagctaaaagaaaagaagttttgccatcaaggagtaaaactccattatttaaataaaataccagggcgaggttaattttccttatcacaataaaaaaagttacttattttaccaagccaccaacaacatcggtttaccgatacattattatcttaattcactttctatctctcagatccatcatcacctatttcaccaacaatttgtaaaactttacgtatttgacctaattcaggatctggatcattttcaacacttaataataaactactcaataatttatcatcaatttcattaggatctgtattaatacatataccaattatacgacgaaattgtgcttcaagttctttatttaaattctttctctgtttcattctttcttctaaaattaaattattttccttatatgctcgtatacgtgcatcaagtacaacacttggtggtatatctttaattatttcttcaatattgtccttttgataatgttttaaaatatcattaactgatatattctttaatatttcaagttcatcaatattttcatcgtttatttcattgtcattattattatcgttattattatcattattattatctgtatttttttcatctttttgagatttttcaatactttcttgtaataattgttcaacaattttttcaacatcttcatataatgatacaatggtaaatggttgatctgcatcaaattctcctaaacaattatcttgattaatatcaattgttaaattttgaatttctgattggaattctctttcctcttcctcaattgctttatttaaattttcaattttattattcattttagttattttaccaatcatattctgtaattcatcatattgtttacgtttatatgataactctaatgttttctccttcagaatcggatttaatctatcaatttgttcatatttttcattcatttcttctcgaaactctttaccaatattatcaataaatttttgcattgaatccagtatttcaagactattaaatttttctttaaactcactaccagagttaagtttattatttacattgacatcttcatgatctttcctattattggtattatcaccattactattattattatctcgattggtattaattttatcattttccccatcactataaatagcattagatttattttcaactttaactttttcattaattgaatttaatttcccatcattaatgtctttgaaattttcaggatctttaaaagttgataaaaatccattattaattgtactatcaacatcaataccataatcaccaggtgtaacaccaattttatttgctttataaggatcagcaccaatatctaataattgtgatacaatatatttattacctgctaaagttgcataattaagacatgtattaccatatttatcagatttattgacaacatctttaatgaaatttgttaaagttaatgaattacttgattttactttattaccctttttaacaacccattctaacaatgtctctaaataatatttagatgaatcatatctaccctttaatccacatgatattgcaatatgatgtaatatagttctacctctattatctaataatgtaattgttggatataataaatctaataattcactaaaacataataattcaaaacaattggttgtatgaacaactctaattaatgcagtttgaccttcattatcacctctgaatctatttgcatgtttattaataagttcttcaactaatgaaattttacctaaagttgcagctaaatgtaatgcagtctgtccattatcatcaattggtacatcaatattaatttcatctttatcaatgattgatttcttattagttccatcattatcttcatcaccttcaattgagatttcatttgaaagtatttgatctaatgtaacttcattttgatatggtaaaaataatgatgacattataacttttgaattctcattaacgagattatcctcatttaaaggtttcaaggtgaaaggagcattttcattaccaagtactaaatcatggtcaaagtattttaactctgtatttaataataattcttgctttgaacgttttgtaggactttgaggtgcgttattgtctttattattattattagtttcattaccatgactaattgaagatttcctcttcattggggaaacattcatatcatcattatgtttaattacatcatctttattcaacgtgtcagtttcgtgatcaacgtgttccgtgtcgctgattggttgagttggtaaaagtggagatacagtaacatcctcatggtccaattccattccattttgaccatccatcttctcaccattgtccaagtgctccatatgtggcatatccatatcaaccgtatccattgtagtcattcaaatgtaaagaaacagtattaaaaaatgtccaccaaaaggaaactgcataatataaaacaagaacacgcaaaaacgttaattttacactctctttgttacgtaagcgtttactaagaattatatatggggaactgataatagatttattattattattatcagtgttgattaacatggtgttttattgtaaattatagtagaacagtagacatagatgagtacagaggaggaaccatcaattacagacatcccagcttccctcaaatcattggttgggagttatattcaaagagctcatgaagcttggtaatgtacaaccacttgtatcatatttctgttatttatatgcagctcaattaattatggaatctcaattacatttaactgattcaaatgcaacaatatatattgaagtattacttaatacaattgaagatgagagaacagaagtttcaagaaaaaatgccacaatttatggatgttttatcagataaggaaaaatcatttaaattaatattaggattttcattaaatattttcaaaaatgctgttaatgcagttgaaactcatactgcaactaaggagacagctgtttcatttaaagctttcctgacatttattgaagtagttaaattatggcctgacttttatgctactgagagtgatgaaattcataaacatattaaatatgctaaatttcatgcaactagaatattaaaggcattgaagaatggtactgatattaatgattatgcaactgctgatgaattaaaggaattagaagaattagaaggtggtgaaaataacaagtgaagaagtaaatgatgaaataaatgaagaaataagtaaagaggaaactatcgatagcgccgtttcattaccaactccaccaaatgatattgaagggtgaattgaaaatgccttcaactccagttttaattaaaggaaggaaaaacaggtttaggattaccaacagctccagaatctgatattacaccggaatctccaaaattacccgaaaagccaaaatctacaatacaaaccaccatacctgcacctgtaattgcaccatctaaaccacaagttcaaccaaatccaagaagttctaaaatactaactaaggaagaggttcaaactatttggaataaagaggagattatctcaaatgcacaacgtaaggctaaatttgcaattagtgcacttaattatgaagatattgaaactgcaataaaggaattacaagctgctttatcattattacgtggtgaataatctgttttcttttaattattatttcttactaattaattaaattaattaaactctataaaaatttgtttaaatgttataaaatacatgtcataattcctatcttacattatcaacattaatatcattattaccaccatcagttgtacttctatcgaaatttgcattttcagttgtatttcccactccattcccaggtttattaattgaatcattatacccatatggtgtatattcagttctgacatattgtactttattattatttaaatctgtactactataagaaccgtatctacgattattataaggatttgtaaaatttgaattataattgatatttggtggcgggggtatactattcattggagcaggtaatgaaactgatgctggtactgcagttacaggtattggaacagaaactggtacagcaacataactagtattagaatttgtacctaattttggccgattatttgaattagcgtaatcattattgctgtgacttctatcttcagtattagataggatagattacatttctattagatgtttgttcatcatattcatcttcatttattgttttaatagttgaacttgggaaactagattgtgaagaataaagtgaactttgttgttgtgaaatagtaggaatgggtctttgcactgtatccgaatttgctgttgtgggatttgtacttggattgatattagaatcggcactaggatatttaatcagtatttcctgtgatgtatataatggatatttaggtggtgtagggaatggtgtatattgtaccatatttggtcctgctatcatagttttgggatgaattaaaataatttggcggtaatgaataagatgaatatttactccaactatttgaacttgaagctatatcttgaatctgttaaatttgaaggtctctcttcaaaattattagattcttcctcaattttggctattgtacttttaggagtatcacctcctggtatactaatccttttttcattatattcaccatactttccatctttatcttgatgaatttttttcttgaatgggttccggaatattttgggtactttgaggatatttgggaattattggttgataagtaagctttactataaacaggggtgttgaatagaattcctgggacgttttgcggagtttgataaatcgcactagcagtagtatttggaggatatgtgacaatcggcacataatgtgatgtttcatacggttgtgacatcggtatcatagattgttgtcgttgttgttgttgaggaggatattgaacgtgaatgggagcctgtggagggtattgaatttgtacagtagctggtactgaaagaggatggtggcggtagttgttgttgttgttgttgttgaggtgagggattgagattgttgtatctgcggcggtggctgaatttgctgtgttggttgttgttgatattgttgcctgataagcatttgttgttgatatgcattgcgcattctcgattcattactatcataaactattggtgcaggttgaatcatttcaataggtggtctattaaaagtgtcaatcatattaccattaataggtattgccattactggcttaagctgtgtttgtatttgtagatttataattgtacattttattctgttcagttaacattgataatgttattatcattactaatattattatgattattattgtaattgtttatttgttgttcattaataataggatatgaagaatttattccaggataacttccatcataataatcacgtttcacctctcgatcatgagaatctcttcgttgattaaccgaatccttgtctttatcattgtttgtattataatcatgtgcctgaacgttattctcattatttgaataatcaacaatattatatgaaggtatatcagggtttgataatctaaataatttaattgcttcttcttcagcttttatcctttcaatagttgctttattcagactaccccttggtcgtcctggccctttacgtttatttttagttattgagttagtagatttagagctagaattttttttagtaatatcgtcattagtttttttattatgatgatgacgattattaattttagactctgatgtaacactaaagtcttccgactttgaaattttattgtctccagcggaattgatttccttattagactgaacagtatttcgttcattaattgggtctaatcgcctcttagttgttgtattatgcatattttatagtgtaatattaatggaaaaactttgtacagaataatactgtttatgtaagggcagaaaaagaatcccgtgatttcaagagatgttcaatgtagtataatctgggggaaaaacggcacagtttatgcttgataactaataaattatggctggttttaacacgatatgtcaaaaaaaaaaaggatttattttttccttctctattacactatggactggctttctcagatgtgtatacactatatgtgtacctgaatatgggatctcgatctatatttggtaagtatatacgaagaatatacttgtttgtatctgtagactggatctttagggaaatgtagtaacactctatatattgaaaaagaaaagaaaaaaaagtaatcgatcaatcagtctgagagatacattagtactgtgagatataataagttattttgatattatcaatataaaagaaaacaaagaacaagaagaaaagttttctacatgcacaaaattatgttgctaatacttgacaacaaggcctaatttccttagttacgctattaaacttaaaattatcatgccttattgttattacatgagttattgttcaatttcctgcaatgccccagtttaatccgttagttttaaataactctaatttattatggaactattttttagactacattttcagtgttattacgatatctacaacatatctacattagatggacaacatacaaacttatctaccaaacacgtgcatgaattccaacttgcacacaataacaagtcaaaaagtgtgtaatttcccaacaaaaagtacgagaaaatttgagaaaatcaaatttcgtcatcttaagaaaaagaaacgagaaattgcacttttcccacccctcttggtaaaattcgctgcaatctgcgctaaaattaccaaaagccatagacctttttccggtttccgaattaaaatctatttatatccgacaatctaaggttaattatcgattcggttttattacttatcgttattttgattaaattacatattttattatcgtaattaacattacatgtgttacatactttcggaagttcggcgactgccttcacgtagtctctttttcagtcgttcacttaacattgaaacatcagcaacatcactttcaatatcgttattgttggaatcattcagactaataactctaccatcagctccgacagtgtatccctctaaagttatcgattgtgtctcagagaatgtttctcctttttctttctcttcttcttcaacttctttatgtacaatccctctaacttctaatgtcccatcattgaattcattattagtaatattatcattaacaccatcattatttttagaatcacttgtatcagtagtaccactattagcagaggcactattgattgatgtaacaatcaattccttcaatttattcctcttctcaggtaatctagagttcttcaataaatcaatagatttctccaaatcaatattagtattttgaattctttcttcctttcttctcttattctcttctttaactctaatagattcctcttgctttctttccatttcttcgtatgcaatattctcctttgaaactttttcataactttcactaaaatcagaaaatttttgaaagaaagaatttctagcaaattcatcagcatctggatcttccttaaaatacttcataacattattaaacatttcaatagcaacaatctttttatcttctaatttagcaacatttcttctcatagttggtaattctctataaacaatctttaaaaatttatcctctggatgaaataacccactattacttaaattaccactacttaatgatgaatcaatatttttaacgcttgaaattaatccaagacaatctttttctaaatgttcaattgaaatttttgatgcattcttgactggttgtaaatctttcaaaaattgttgaatttcagggaaatctttacgtacaattttctctaagaattgtaagaatgacattgaattattattattcttcaaaaagtttaatctctgtaatgtacttaatctgaaaccaaatgccttcttattatctgtattcatataattacctaataataaaataacttcaaataattgttttaatgcatctgatccttcaatactttgagttgctttttcaactttacttaattgttcagaaattatactataatcttccttaaatgaataaattaaatttaaaactctcatacgtgatctccaataatgatttaaattgaaaaatgtttctaaataaattctatcagctcttgctaattcatttggatctttatctggtttagaaacaataccttcagaattccattcagttgaatatggttcaagatttttacctaatgtattagaaatctcacataattcagatttacccaataattccatgattttcgccttaccagtaatctctggtgaacaatgtaaaatttttaaaacaatttcttcatctgtatccttatgcaatggttgtaaacaaatattaaattcttgtctctgttgttgacttaaaaatgatttcttttcaactgcagttttagtattacgtggattcatcttagcttcatatgcagcaaataaatcttccatattatcaaaaattcctttctctctaaatttctcagcaaataatgaaatatccatatctgaccaaagtgaattgtcaatatcatcaatcttttcccaatgtaattgctttaattttttcttggttcttggtaaatgatcaaatggtgatgataatattggtgacatcattggtgatgttttcctacttccaaatgataatggtggtggtggaggtattggtcctcccattcctggtaaaggtaggtggaggtggcggtggaattccgcccattccaggaggaggaggaggaggaggtggtggtggtggtacacttgcattaccaattgaaggaaatgtgggtggtggtggcggtggcggcggtggtggaggtgcaatcgaagaattattagttattgatgctggaagtggcggagctggaggaggaggtggaggtggaacagtgttgacatttaaagatgaacttactagtggaagatcttttgaaataggtttagattctttaaaaatatttttatcatcatgattatcatcactaatttcagaatcattgttaacaatatcacttattttcttaatatttttcttcctctttgaaacgccagtgatattatgttcatcatattcatcctcatatttattatcgtcttcatcaaatatttcatctaatggtgaatgtagaatcatatgtcctttctttggatgattcatcctttctattctagcatcattatggtattcaacaaaatcatcatcatcaaaatcatcataattttcagcattaaatgaagaaacagccgacattcctgtacttgtaatgttctttggtatgatatttctaagatcgtggttgaaattatcattgaaattttgtagtttcgaaacttcagcctcattatcagatgtacttacagtggtattaacatattttctagaattttgattttgattaatagtatgagaactactgtgagcaaaaatcgtcttactagtagcttcagatttaccattatcatcattatcatttgaaaaatcaggtgtggttgtggtcatattaaatggtttttgtttagcaactttttgttctaactcacctaggaatggtttcatttcttgaacatttaatttatttattgtttgaggagtaacaactggaccagcagaaaattcagccttgggttgaacttttgaaccatttgaatatttttcttcaacatcacgtataattctttcaggatcttcatcataaacttcatcatcctttaaacttaattggaatttcaaatttgaacaaagttcctcgattccatttaattcagctcttaattgtcttgaacgtgtagtatctaatttttcaaacgaggtcattgcaggatcaagagtttttcttggctttgatttattttcattatcaaattctaactcttgaatttttaatgaatcaatagaactttgtaatttattcaatctatccaatgcttcaagtttctttctttctaatgattcttgatgttctaaatccgtttgtaatttaataactttattagcatctttttgaagaaaatctaatctttttcttaatgaatttaatgtgactaaatcggcatcacgatcttttaatgatctttcctttgataaaacaatagccggaggttctggaatactaccaaggaactcatcaaaatccatattttctaaatctctagcttccttttccaaaccttctaatgcagacatattggattttaaatgttgatgtttgtttttacctggtgtatatttagaagttgatgaagttttcctatgatgcgttggttttaatgttgcaaattgattttcctggtttttccttactatgagcagcaattaataattttctaatttcttcttcattcttttgcttttgaagaacatttttacgattaaggttttgaatttgattttccttaaattgaatagttctcttcataccggctaataaattatctctttcatctaattcatcttttaatctttgaattaaaccattagaaccttcatcaagttgatgtttaatattatctctttcagcttcaagttcttcaactctccgcttagcttctttttgttcctccattgctctttttgcaatatcatcacttctatatgctgctaacaatttgttaatactgatattcatattactattctcatctgaatttgacattgtgatattactaacaaaatcattggtcaattttaaatttctcattaaatcttccggatgttcttcaactaatgtatttgcattcaaaaaaatattttgaactaaagatttcaattgctcaccagttttagtatttttggaactttcatataatgcttttaataaagatactggatcttgaaaatttatttgtttcattttaaattcattagttttccttaattccaattcatcattttcttttatagtttcgatatcagtaattattctatcaacatctggtatatggaataattggcatccgtctattaattcacttaatccagcattttccaaatatgctctcatttggaaacgagaattcaaatttccagatttttcaacgaaaaatcttattaatattaatgttgcttctgtatattgttgaataaattcattatcaatataacctctatactcaaattcaggaaataaaccaactcgagaacccattttaccaaaaccacgaagtgcacgtaatacacaccaaatccaagactcacattttgaaacattaggtaaagaatttaagagaatttgagaacgatcatcaagtctaaaattggttgtactatttgtataatattctttgatgaacatcagatgacaattttcattcacattcttttttagtgttctaaatacatattccgagtccccaattacaaatgaataatgtgcaataatttttgatgcaaataatctaattgaagcaactggtgaaaacataccactaaatatcactggtatgaaaagtgacaatatttgtaaaatactttctgaacctacagttgataatgcaatgactttaatacatttgaacaatctttgttctttttcaataatggttttataagtatcactaatgttgataaaagttttttgatttttcattgattgatttaatggagcagttaataaaggtttggttttgtatagattgttcagcacattacataaacatacagcaccatcttttttcaaaaattccttcatccattctaagtcttctgatgttaaataaacgtataattcttttaattgatcagatgtaatggtgttactcatcagtaaagtaacaaacgccaatggttcaatttgtgaatgcatctgtaattgaataggatctttccccttcgtaggtgatttggtttcattttctcttacatgttgacgtttgaactcggtaattttttgttgacggataagcatccattttctctcgactgaatagttcagcatttctacccttgctctttctggaattttttcgaattctcttgtctgcataacttcagcgaacattctttcaattaccgcaggatcatcaggacgttctaactcaaaatcatctgagattgtatgcctatgtgcttttctaaatccaacaccagaaagtttcttactatgtgactgtggtaataaatgagaaggattattagataagaaactagaattagtgtgtacttttgataaattatcttcatatggtgtttcagtttggtttctagatcttgaaaaaaatgaagatttacttggagtttgatgggatgatgatgcaattgagtgttggaaatcggataaatttgaagaattagttgtatatcttgataaattaccatccaatggttgagggtggctaatttgtatttgatcaaagttttgggatgaaggttgtgaatttggattgttttgttgtttagaatttttccgcatactacccatcaacgagttcattattccaccattggagttaccagaatctgatttcttaaatgatgaggacttcatattggaaaaactgtgaaaaataaatgagcagaattgaattgaattgaattgaattgaataagtaagtgaaagaattaaaataaaaaataaattaaattaagtggatataatataagaattgaatgtattaacaacaattgagttgataattataagtatatgtacagtttaatatcaagtggaataatatagtgtttggagtgacttagtgttatcttcaactatcgtttcactgggcgaaaataagattgtttgaaagataaatgactagatttaattgatattgatgtagttttgagaaaacaaagaacacaacaggagcagaaaataaatagggtataatttccagtgtgtcagtatcttcaaaacacgttaacaatagaagaaacagagagatatttcaagagcaaacttgtagacacttcatcaacattaatatttcaattcatcaagtttgtctcactgtgcatcgggaaattccaattttttaaatctttggcaaaatgagggacttgcgacatttttgcggtcgtgtcatgacatgtcttttgtctttattgctgacatgattttctatgtcgtttgccagttttgggtatttttattttaatctgtttacagtgttaactttttttttgtttttcttaattttattaacacgtatggacatagttaacaatgtcttggaaatataatgcattacctgataccggagatagtccattgcctcgttataatgatcagatagaggatgaaataagtatattggatccaatgtctattctaaacgagaatgaacaagaagatataccggatataaatattcttggaggaacatctaatctcaaacacgcctttttcaatatgacaaactcgattgttggtgctggtatagtggggattcccatggcttttttaaactctggcctgttaatgggaactattttgatgattattttaacatttatgaatgattggacattacgactgattgtcgttaatacgaagctagtctggttccaaaacgtatacgggatgtatttcacacacttatggtaattttggaaagattgtggttctcttttcacaaggattctttgctgttggggggagtattggattcactattattattggtgattcaatacctcatattttaagaagtgttttttcagaacaagtgaaagaatcagcattgttatcctttcttttgagtaggaattttattatcacattctgtatttgttttatttgcttcccattatcattgattcgtgatatatctctgttagcaagagctagtggactggcattgattagtatgttcatgattatttcaattgtgatatttaaagcaccttttgttgatgaaatatacaaaggtagtatctcaaatcgggaatatatattcaataccaatatatttcagggaattagtgttatctcatttgcgctcgtttgtcatcataacactactttcatctatgactcaataaaagtaccaacattagatagattcaacagaatcattcactactcttgtgctatatcgggatttttatgtgcattgttaggtatttgtggtttcatgaactttggggataaaactaagggaaatatattaaacaatttcccaaataatgattggcttatcaacatcgcaagattttgttttggtttaaatatgattacaactttgccattagaaatttatgttataagagaggttatcaaagacttatataccattttcaaaagaagaaaagagccctcctttgaagcccaaaatttcacaacatttcagcatgcatttgtcacatctattttactacttattcctttaggtgtttccataatgacatgtaatttaggagctgttttagaaatcgttggtgcaacttcaggactcacttttagcatatatactacctccactttgttataataaaatgactaaaggaaacaagtcaaaattacagcaaagctccatattatgcgtgtgcaacttttgggtttatggtcatgattttgtctactttccagacgatatcacaaagcatgaatagttcgtccggaacgaatcactgtgcagaataaatcattttttgttagaactctatataagctttataaaaattattcagtagtgttactgttaattaaatcatgaacttgttttaaacttgcaaatatatcaatttcagctggctcagtggattctgatagttgtattttatcactatcagcttcagtcagtagcttcattgttttctgatgactcaacaatatcttccatagcatcattagtttctttgacaatatcatcttcacttgaatcagcttcatcacttaaatcctcatcatcactaatgaatattggttggcttacgtttactaattccaagtgtttcatcatcagaatcatccatgttttcatcatcatcggaagaaacagaactactatcgtcagaatcattttcagattcatcgtcattgttattatcaacttcattattatcactatcatcagatttttcattgtcactatcattttccacatcattatcactattactttcactatcaccttcactaccttcctcttcagattggttttgagtaccttttaataatttcattaatgagtctgtatctggtttattcagtgctgcagtttgtgggcctaattgtgtattttgatcaccaactaaatattcatctaaatcactaacatttttcaaatccagggtattattcatcaaagaatcatattgttgttttgtaatttgaccatgacgtttttgcaataattcttgtaatttcatttctctttcaaagaaaacttcatcatccatatcttcatcactatcttcaatcctatctttggaaagatgggctctacgtaaaatttcagtatcagataaaacttcatcatcatccttgacaatctttcttctttttcttaatttcttcttatttcttagcttatcattctttgatttgtgtttcttttcctttctcttttttcccatagcaactaatttaccatcagcagtccttttcattgctttacccttgactctgttttctgaatttttaagtgtagcttcaagcatttctaattcgtccattggcgcatcactttcacttcctgccaaatcatcatcattaccacgttcatcatcagtgccgtcatcaataccttcactgccatatccatgatgaccatcagaatcggaatcggaatcttctcccatacttctcatatataattttcttttttgtttgtctagataatttggatcgatgaatttgttttctagatcttcgtcattcaatggagtatttattgcaatgtcaatcgactgtttatatgagagtaatttgtttgaatcacgtccaagaagaacaccattgagaatacctccaattttacaaagctctctgaaataaggatccatattacattctttgaaaattaacccttgaagtctataactacccaactttccaataaattcagtggaaggtgtgattgcatgtgttaattctaaataccattgggataagaattgaacaagtgactcaacaatatgaattttatccttgtaaaataagtatgatacaatcaatgcaatcttttcgttatctgaaatatgagcatcagcaaatgaaatatctttattaccatgaaagtcagctttttttgttctttttggttcagaccgccagagaatggatcacctgaaatataatattgtctaatttctaaatcggtcatctcattgaaagacattggttcgagtaaaagatatttagaatttgttagtgaaagttttgtaaaatgatgcatgaagtaattaagtaacataccaaactctgatttcaacttatctgatatatttgcagtctttaattcatgaagagcatacatgaaatctagtctaaccaacttcagaatatttgatttccaatcttccaataatttactaaagtatgataaacaataacctaatttcttttcatcaatttcattatattgtaaaaataaccaaatatgtgtggatacagtatgatcactgaataaaatagttttgaatttgtcacataagttaatgtctaactttttcagcctaataacacgtctgttattagttaatccttccatatcaccaatgaattcattattttcattgaaatcttctcggtttttattggacaacataattggtggatctaatctagcaatataattgattgttttaaataagacatttgtaaattcaatcataccaagtgcaatagatgaaccttttttatgagcattttgtggataacgcaataatgtggtaatttcagaatcaacttcaaaaattaatctcaatgaaccttcagctcttgatacgagaccttttagcagtaatttatcttcacttaggagtcttgtatcattgaatttttggtaagaatgaatcatcagtagtaaattgagaatctctttgaaaatggaaattgtgatattcaaacattcataatttttgatttctagaaaatggggtatagttctattcatcatcatttttaatgaacgtccttcaaaacagcaaaataaatatttgaatctttctaagttggatatacttttttgtttatgtgattggaaggatttttcatagtttagcatccagttgataacaaagaaataatgataatggaacgtaaaatcatcggatgtatctctattaatgagaatattattgatctctttgaacattatatgaaatccgttctccctaaaatcgttcacaaacttattgacaagttttctagtatctctattgagttttgcaaacttctctggttgatctgtaagtccagatttttgtctatttatatgtttacctgataaagttttagaagcgttggaatctaaaactgataataaatcattattgaaaagcttatcttgccctgaaaaaacacggttagtatttttacttatcctgaatattaatcaaagaaccaaagtgtgcatgtctggtagagctacgtgatttaaattttcgtaaattgtcatgttcttcttcctgtaatagtaataacttagagttagtggcacttaatgtattttcattattctgtgattctgatggagcatcacttaatcttaaattttgagccaattgctgtgttttgcttaacattgtatttgtatcttcagctagttcagttggatcaacaaataaaaatgtgtaataataaaaatctaaacatgaagttcctaaaatttcagtatcaaattctttggataaattagaagcaattgtttgaatgacagataaaacgtgatattttttaaagatttggaaaacaacatccaaagatatatcattttcagatataccgtttggtaacgcttgaaagacatgaacaatattacttctattttttttagcaactttagcatcagatggttgaattctcaaaacattattaaataatgtcaaacacaaatttaaaataattttatcacgtctagtcatatctttcttttctagttccaagattggcaacattaaatttatcagaattttgaatattttaccttttttataatgtaataaacgatgtttatattcaatttgtgctcttcttaattttgtgaacaacttatcttgatcattatcgtcgtcgttttctaatttcattggagtcataagacgcactataatttctaatgtaactaaaagaattttcataatttcaggatctgtatttgcagtaccatgaccaccaaattgaaccatgattggtattaaatcattaataaataaaccactatcatgacacgcagatgcaacgttcagaacatgtttttcctcatcgacttgtttcaataattgttttatatctttcaaacatcctaaagcttccataccaagaatataagagttaggtggattaggatcaaatcctcctaatgctgatgaaagcattgaaatattacgttgaatcttctcttcgtctttacgtaaattatttgtcattgaagctaatggatttctagtcatattcataacagatgataatctgctttctctttttattaattctttatcttcaaaatcttcaacatcatctttcatttcacttccgctatcgttttctctatcactttctaaatcagacagaagattttcattatcaagaccaaaatctttattgactaaatttttttcaaccaattcttcaaaaccctcttcttcttggctgtaaaaaacatcatcatcattattcattttcttggttgtggtatgtgtattgcactttaaagcaatctgaaaccagttcctgttaattcattaaaatcatcaaaaatttcaaattcatgcacacgtccaaatccaaataaattttcgcgtcgcattacgtaaattagatattacgtaatgataaatttatgatctatttcaaccttttaactgaaaagactttattttaatttaaaagctaatatacattttataaaacaacataaaccaaggtaaatcattaccattactaagctattggggtatttctaatggctctttcattttcatgattggataatagtatgaaatcgctattatcacgagcagttgatgtttctatttcagatacttcaatttcagattctgttgtatcaagagctatcacttcttgaattggagtaatttcaataaccgtcacatcatcaatacgctcatgtgtatcaattttctcatattggttgagaagttcatcatctagtttgacattagtttctgtgagaattgtgcttgaagtgggtttttgaaaaatatcatcaacatttccatattcattatcaacgtcattatcctctaaactattatcctctttaattttttcctcatccattgattctacaccaagatcatttaaatcatcatctaacattgactcaacatacaccattgtacctatcatttttctgttgctgtatatgttcaaaaatcgtttcgatgcatcatatgtttctattatattcttaaaatccttatactcatccaaatttttgattaaaaatccaactaacatagatggatctacttttgtgatatctaattttcgtatacgtgtggtatgtatactttcctttattgcttctttattttcttctggaatattaccaaattcatctagactgattgcattttgctgtatatgtggatctaaataaaacaagctattactttgataaccaaaaaagtaatgtgatgaagatggtctaccacccgcaatcccaacgccaaatttcatacttaaagttaatttcaaaaaatcccaatatacctcatttatactactcaatcccaatctaactccacataagagtaatattggagtaaatttaacattattcggtattttttccaaaactgtaccatcttcataatcatcaattgccattttgagtagttcatcttcaaaaatatctcctgagttggttgaaacataaactttcaagtctaagtctatattagggttacttgcatcgggataactattgcataattcgaaaatactcttagcagcatttgaaggtccaaaccattcacctggctttttaccacaatattttgcagcatataaaacgtaattatgaactgaaaacctggcacggggagaatcagcaaataaagaaacgatatcccaatgttttttcaaatcatcttcacaagattcatataaacgccattgtcttcctaatttcaaattcatcaaggcattacctaataatgattgacttgttctaatcatacatccccaacctgaatctgaagtaaaccctttattagcattacttaaatcaaatgagccacgaagtaaggctccaatacttaaagggtttggaccatttttgtctctttcaattaaaggaaatccagccctataagtgaataggagacgggtatttaaatcatttagaaaatcttctggccattcgttaatcaaaatacttgaattaaatgcattaccttttgtaaaatcaaatgttggttgtgtgaatttagttaaaaatgatttaatgttttccattggacctgtttgaatgttggatttaatattgatgtgggtatcgattgtttctgctctgcccccaatggtttctacgttctgggaattttcagggaagtggggaagttcactttcctcttcacatttcacgtaggtagaaatcaattgatcttcacccgtggaaggtttgcgaaatgtctcatcgcccgtatttgaaggctcagtatcagcagccccttctacatcactcttatttgtatgtatgtcaccattatcaacattttcattaatatcgtttattttgtgacttgattgatcactatcttcatgttcatcattattattttgatttctataaactgttcctaatattatcaactccgtagaatccaatgagggggtttcaccgattttcgatgtataatcaataaaatgatcccatatatcaataattccctttgattgagtctttggatcctgttctctgctcattggtgcttcattgttcatattgtttaaatccaaatacttctttaatccttgttaaacaaccaactgatgataaattcaaatcatcgattaattaaaacaataataagtatacaacccagtgggaacaataggaaatttggaaaaactgagaaaactgggatttgccatttcattacgtaatatcatagaaaaaattattatcactgattaatagacaacctggtgaacatgaactagagcagtcggtgtttagtgttggttgggaagcctaagttatataggcatttagttgtatcaaacaaagattttacattttaataatggctaatagaaaaggacgtactggtgctaaaagaaatggtggaagaggcggttctagaggtggtagaggtggatcacgaggaagaggtggtagaggaggatctcatggtgggagagcatcacgtcaagcaactttagaacaagatattgatatgtttgtcagtaacagaggtttgtcaggtgattttatagctttacagaatagaagaaatgctgcacctgttaaacttcataaaaaattaagaacttctaaattacatgaaattaatgatatggttgatttaaatagaggaaatttttcaaatgttgaagaaatgtctttaaattcaatgatgtatgatacacatagtacacgtaggaaaaagttcaaggaaaatagtatgtataatgaagttagttatactagtaaaaatagagaaaacatttttaataaaagttatagaaaattgaccattgaatttgtgaaggcaaaggaaatttatgacccatccaaagatttgatgaaaaaacttttaggtgataaatttgatgataaaaaatatagagatgagaataatgaaaccatagtagatattgaagctaatcttatagaacaaaataacgcagaaaaaagttatgacgaaaaggatgatgatgatgatgatttgtctgacatggacgaatatgaaatgagaagtggttcggttgaagtgcaaaaagaaacaactgaagttcttgatgaaagcaatattgatatgattgaaatatcaagataatattcagaatgtcgtggaaatgaatagtgaacctacaatggaatttgtgcagttggaaaaacccaccaaaaaaacagaaatgttatttgttgatgataatgatgatcaagagtttcatatatcgtattatgaagatgcagatgaggatgatgaagatgatggagatgatcagctgagagatgatgatataaatgatgactatgatgattatgattcgaacaaagatgacgacgaagttgaggataatcttttagtacaaaatcatgaagttaaaaagagttataaggatgttgatggtgatgaaattcaaattggtaaatttttgggtagtatgaagaaaactaagaacggtgaacaatttattgaactttcagcagtgaaaacaagaaaggataagagaaattcagaaaaaattttatacgtggtagaagatgataacgataatatgggtgttgatgaagtcgaatcacacgttcataaattattacacggtgaatccggaaatgttcaaaaagaagatattgaggaggaagatgatgacccggaatttgggtttttggaagaagactatgtttcttttgatgtcacccaaattaaaattgaaaatttaagggtcggttccgatatcaagaatgaacagttttatgtgcaagctccgtatttacttggctctgatgaatttcaatggatttctagagatgaattttcaagtattttgacagaaaatggtttacctgaccatagagttaatgcatttatcaaaagtgcaactctttccttgatagatccaagaactaatgacactgaaatgctgtttgatgaggatgaactatatatatccgatagttcagaagaagaagaagaagacgatgctgattatgaagccgatgaaatcagactaaatgatttccagatacctacaaataaaaagaagaaaagagctcattatgatagtgatagtgagtcattacaaagcgatgctgaacttgatgaggaactattagaaggtatggaagatctattatcaatgcatcaatctagtaaaggatcatatgtcgatcctatggatgttggtaccagaactatcagagcaaagggtaaaaagaagaatttcagacttgaaactaatactgagatcaatcctgaattccaaaaattcttggaagataaatacatcaccagaaaggagaataagaaacaaaataaagaagagagagaatttgctagaagaaataatacatacatgttaaccaaatatccatacatgatggaaatggaggaaatcatgaatgaattaaagaatttagaaatgatgaaatccgtgaaactctgagattcccacctatggactttcatgtaaatatggttctacggatctatttctgatgcatttggatattcttccaagaaaataggtaaaggtaaaaaagaatatttagaagttaaaaaacctagaaaaaacaaaacaagagaacctgattggattagaatcaaaaagctatcaacgaagagaaatgtgtgtttcagaatggatgttgaactttcacgtgaagaaaagagagaattaaagcgtgtcaaaggtggtaattatgaaattgaaaagatgaataataaaggtcgtggtaagttcagttataaagagggtgaagttgttggtgttggtgcgaaagaaattggagcaaatagtattggtaggttattattagagaaaatgggttggcaagcaggtgatgcattgggtccagagaataataaaggtattacagaaccaattagggtggttgttaaaacatctaaacgtggtattatgtaggttcaaaaagagtttcttacaattaatacatagcctttctataaatcttttcaatcataaggtaattttaaatcatctattgaattcatgaaattcatccaaccactatcctttaagatatccataattgtatcatgaacttgatttggatcatcgttacattgatccggaacgaacggagttaaaatggttttatctagggtgttattatttgtggggtttatctccggattcgttcaaattatttagaatatttctatttaaatctgtaaggttatgttggagtgtgttagtatctgaaatactttctgtgttgaattgattattcttcatttcactttcaaactgagcaagtttttgtttatatgcaacttctttttgttgaatcataccagaacaataaagatcatcatcagattcagaggatgaatcagaatcaaaagttgattcttcggagtcttcctctgcaccctttgtcattgttgtagttagaaggtacatagttttgtgtaaatttctccgtatctaaaacttcttgctgttctactggatttgactgttcaacttcattttgtatcaaattcgaaatatctactcttgaattagtgtgcagtaggctttttcaacattcataatagtttcatttggcacaactttagttttttgcttttgattgattaaggaaatcaatttctcaaaaacatacattccacgggatgcacatcttgatggaaatttgaaggatttgaaaacatttatacactttccttacaagtattttaatacttttctgatttttaaaatgtttattatcaagtaatgtatcaacaatcaaaaaaacaactgcataaacaacttgatcgcatatacttccaaagaatttatactgtaaagggattttcgtagagacaaacatagtaattatttgaattgagttattataacatgtatcataacatttttgtagccattcttcatatggtaagaaagatgacattaaaatgttcaactcaagaacttcatgtaagtatcaaattcttagttgtaaactcaacaaattctatattctgtattgaatgatcacttttacttgattctttaatttcatcaatttgtttaaataattccacttctaaaaatcttaattctaaatcaccttttttcaaattattcaatgatatttcactctcttttgaatagtatgtttttttaattattgcaatatcaacagtaaatcttaaatagaaattactccaatctattacttttcatctgaatctttccatttagatggttttggtaaattttggaaatcggatattttaattaatgaaaatctatcttgagtatcataccaatcatatgttaaaatttcccaaaatatgttttgctgtatggtatttgtagaatgaaaaagatttaattgatatgccaaaaagtatgaaacacatgttaaagaattacctaaaacatttccaccgagtaaaccagataatgatcttaataatgtgataatttgtattgatctaatattaggatgcgtcatataccttccacggtagagagtttctaaacctgcagcaaacaaacctttggaatatgtatcccaatcattatctgaaaaacctaaaagtttagcatcatcatcagagcattggtaaactcccaaacacattaatgaatacattaaacttaaaaataagtaattttttgatgttttagaataaggtatagtgatatgtttctccttatatctttcattactccaatattcatcataatctatccaaaaggcatctatatcaaatatgggcttcaaaatgctaatttttaaaccatttttaactaaaatatcacaaacggattttttcaataatctaattttctcaagttcatattgccaacatttagctcttgaatcttgtgcatcgtactcaacaaattttttgtcttttaaagttaaccaatcctcggtattgtaatccatttgtaatgattcaggggttgaattatctaatattaaaccatttcctaaaccttcctttaatcttgtaattgtaaatgtgtatctgttccattcattcaattcttttaaattacttgttgttttagctgtgtatttctttttgctttgagtatcaattttgtttgattgagagtgacttcgtttctttgagttaatagaattattattgttagtattatttttattggaattagaattatttgaatttgaattattagatgagttattatttttacttgttttttcatttgataagtccaattcttgtgatttgagttcagttatcattgcctgtaactcctttattttctttttcaaaatttcattctcctgagaaaatttcaattcgtgttgattattattattaattagcataccatcaaatataacagtctctctggtacataaatgaccttgatttctagcaatacacctatcacaaggaatttcaaaattacatttaactttccttcttttacaatttgtacaagatcttatcagtctattagtttttttaattttagttatatcaattggttgtgactgtgattgtgattgaggttgtggttgttgttgtggtgactttttaacattgaaagtgtgtctggcattgtttccatcattacaaccatccaaaaccatggtcaaaccttattaatcagtgtgaaattgaataaaataccgcctcttctgatcatcgataattaatcaacatcttatcaatgatttattgtaaaacatggatactcccaaataggaaataaaatccatatcaaaaacaattacataagcagatgacgtaataagcaaataaaaagaaccctactaggtggctcattcatttattcaacatttatttgttacgtaatcaaagagcagtaaaagtagcttaggctaattcttgcacaatctgccatcatcgcactttttttgatttttattttttatttgcgagatgactcggctgttgccattagagaacttatgtggagattacccgtgcaagtttgaattaatgaataaactaacatagtttctcttatgtttattcaagctttttccttctaagacacttgaaaagcaatgtatctggctccagattctataaaatcttgtttgcgatgtaagcaaagaaagataaaggtatgttaattcactattatatcatcattaatatccatttttgattcattcattccttcatcagaataatttactaactctattgatatccacttattttttaatattacagtgtagcggagaattaccaagatgtgctcgatgtgttaaagctgatattgattgtgatatagtcgataatgtatattataattatgaaactgtcagttcattaatggctaaagttgctaaattagaatctaagctaaaaatgaatgaaaatttacaatcttcgaaattctccatatcaatcaactaatattgaaatgaactataataataatcaaactttatctcctccgaaaactacaagtccttatggtaaggataaattaagaaactccatcaccggttctacaacaagtaacgggacttcaagtagcaaaaataaggaaagtacaatagaggatatttccaccggtgttggtagtttaagtttagataatattaacggatctaataatgaatctcagcatcccctaggtaggtcttgcttttctagattgtttctaagacagttacatttggatgaactgggtgtcgttaatgtaagtttggggaatgatacttttgaagaatttgataaatctatcactcaatcgggaatcccacttccaccttttaggatagctaaatgtgctattttcaaatacattaataccgttcatatttattacccttttttgtcaattaaaactttaaaagttatctttaataaaatgtattcatcaccacaagaattaacaatgcatgataaattcttagtgtatattgtcatatcaattggtttagatagaggtgagaaggatacatttatgtcgagctatgttggacaatttaaaccagtggaatattttaatacagcttatagacatttggaagaaattctctcggttagatcagaagaaacattaaaagcattacttttggttattatttggttactgaatacagatgtattaaaggaagaaaatggggatatttggcatttgggaaggtttgcaatgtctttagccatggaattaggtactcatagatataatccagaatgggattttggtacgtctagaaatgaattaagaaatagactgttttggtgtacttatattttagagagaaatatagcattgaaatatagtagcagtttgtcattaaggaagcaagcaattgatactccactgccgatatttttagaaaatgattttattgctgaactctccccatcagatgcttcaagtccattattggttgtttatgataaagttcaatttaaaccttctttatttttaattaatatttgtgaaatttatggggatatcttagaaaatttttatacaccaaaggctaaatttaataatccagcattcccggatcaagaaacttttaatattaaacttcaattacaaaattcattagaccaatggattttacaagttagtagtgaaatacccaataatttaaactgctattatggacttaaaatacgttattcagctgcatcaataatattaaatagaccatcaccagctataagaactcctgatattgaatcaatattgaaatgtaaaatagaagcagaaatttgtattgataattattgttgtctattggataattattggaaagtaactaattgttgcatatatgatttaaagttagttggattaactatgatatattgttgttggaaaacagagcaagatactagattattaaatcattttacaattaagatatcaaaattatttaatgaagttgttaaatattatccatcatttacaaaatttaaaaatttatattcgattatttcatcaattgttcgtgatggaattgatagttctgaaaatacatttagtaatcctacacagcaaatacaacttttaaaacaaagatctcaatacccaatagcttatactaagttagattccaataacccaataataaattttgatgactggtttaccaaagaactttatcaagatgtttttaaacaatattcatttgatgaaaatgacgcaatttctcaagatttggatttattatttagttgaacatgtaaattttttataactaacaaaaatgtttgagctatacaaaaaaaaagttacgaagtaaaaagcatgagtttatgtaaagtaatctaaaaagtttttaaaatgtgtaacggaaatgtttattcatatgatctgtaagatcttctctatcaactttctcaccgatttcaatctcctgttaaaacattagccagcaacctcatcttcaggaacatgttgactatctctctttttattttcataataacataatgatgcatataatataatcatagcaaacataataacacaagctgcaagcattgccttaatacctgtttgatattttggtgcctgagaatcaagaaagaattgaggaccaattaaattaccctaaagcatagaataaaccaacagaaattgaattaaatgctttctttgtttgacctgatgtatttgatgaaattaatgataaacataaaacatacggtgcattatagaaaccacaaatataaacagctgcaagtgattgatttaaatgtttctttggatcaattttccaaatcatgataatacctgccattgtaacaccagttgttaagaaaattaagataaatctaatatttttaacaaaataagcaattgcagcacataaaatacatgcacccattgcaactgctgcttgaggagttgctaataacattgttctataattagagaatccaaaacctttaataataaaagtattaaaattagtgatacctgcattaataaaattttgaacaataatgaaaacaacaagggaccaatattttggatccaagatagattccttaatatgagaccatttaatattttcagtaccaaaatgaataccagtttgatttgttgcagttctagcaactgcacactttttttcattttcatttaagaaccatgaatcttccatattacttggaattaagaaaaagcaagcaattccccaaacaactgtaactgatccataaactaagaacatatatttccaaattgataatgcacctttccaatggcccataccataaccgaatattccattgaaaatacctgcaaaagtatttgaccataatgctaatctaagaggttgttcctttttagtataccaagttgaagaaataataatacaagccggttgaattgcagcttcaaataatccaagaaagaatctaacagccattaaacctgcaaaatttttacaagctgccatacacattaataaaccaccccaaataattaataaaattgaaataaattttgataaatttttaatctttggtaatagaaggaaaactggtatttcagcaattaaataagcaagatagaaaattgtagctaaccaactatattcttgaccctttaaattagtatcagtttttaatccatataatgcagcatatgataaacaatttttatctaataattgtaaaaaactgttataactaagaaaggtaatataacacaatcaattttaaatacaacacgtctatttaacttaagattatcagcaaggaatagctggatcttctaaatcttgtgtaccattatcttcattaaaacttaaaaaaccaccttcatctcttttatttgtacttgacgtatttgatgcagtgtcggtgattacctcagcatttatttcttttgcagacataattgattgtttgttatgcgatgaagagtaaaatattaataataataataataataataaattgaaagaaaaatgtcgtatgagataataaaagtagattatcaggtttatttatacactgaaaatttgataataaaaatagaaaataaactttacatcattaaaccatctggaaagatttaaaataaaaaaatagcacaataataataccaacataaagagaaagtgcattaactaaagataagaaagccacagtataaaatgttaaacacttatatccactttatcgtgatagatacatgcaactttaaattatactttgtaagaaagataataggtcgtccctttgagagatatgcttcattttcttggtatagccgcccgtatttgtcactttacaagtacatatttgctatctactagtacctactatagtagttatctcttcatatcttgctatctttcgctatctcacatgctgtggagagttactgtaaggagtaagtgtgtaaacttaggatgggtacctcggaaatggcggttatcacggggacaccgagagtgtcagaaatttgcaccgtttagaagatttatcttagagatgtggtactccatagagctaggtatatggctagaagataatattcaagaaagaagagatgatttggtagcttaaccataaagaaacaactttagtattcatttcagtttagtaagtgaaataaccgttatctgtctaaaaaatttagacacattgataagaataaaaaatgttctctaagactgatgataacaatttggatcagccatgtatccacagttttcaaaaagttttgtaaaactaccttattaggaaataaattaatattattattactatcattaatttttaaactctataaattactgaaaaaatactatgagctggattagctaacgagacacgatgaatccattcaaaccgattttatcattaaaattaatttcccaagttgaagtacctaaaatattagcagaaccctctattctaacaatacaagcatctttttctaaattattagcctttaaaccagtttctgtaactttagcatgaaaaattgatccaattaatgattcatttacaaaatagtcatctttattatgtttaccctttaaatataataaaccagttctaccagcagttcctgaaccacacggtgatctatcaacttgtttaacacctaaaactaaacaagatttttgattaaccatttgagtatttgatttatcaggtttattccttatattaacaaaatcaactccatgtaatcctttaatttgtgggaaatctttattataaatttttaaattattcatatttttaataatttgtttaacttcaaatccaagattcattatatcacttgcattttcaggtttaatttgcaaaacattttcatcaatttctgtaaaataattgaaagcaccattgaaaacaatatcaccatttaattcacctttactagtatttactttaatattttcataaagtatgaaaactggagtattttcaaaacttacaaattctacatttctaccattccaacatgctttagttaaaatttctcccactgttgtctctaatttaatttccattaattcaggttttaatttatattttgatttattaatccaacctttttcaattaaagttgttacaactgaaatcataccatgaccacattgatcagtataaccatcgggattgaaaaatataattgaagcatcagcatttaaatttttatcaattggatctaataaataaccaccaaacatatcataatgaccccttggttccctcataagtgaattcctaataaaatcataatttttttgtaaatagtttcttttttctaataatgttattcctggtatatttttaggtaacccattaatgacaattctaaatggttcaccacatgtatgtgtctctaatgtggtaactgatattgaattcattaatcttatgaagtgattaataattaagaagaagctatgtatagtgaaaagttttattctttggaaaaaagaactttaagttgattaagggtatttacgatatggaattatatccatttcggagagaccgagacaagtgagtcgggtgtaccgtttgaggtagaaggtatattatatcgatataatgataataaagaaagagtaagagaggaagtgataagtataagagtgctgtggcatcaaggtagtgtgttatgtattgaaagtggtggtaaatggtgagctaccagacagtttgtgaaatggtagtgtcaagtgcagaagctatgagtagtggttttggaatttagtttagtattattcccttcacttactactaattacctacagatacactcttaccatgtacataagtctatctactttaaaactaagatatattaataataaatacagaactatataaatataccatagagaatacaccccataacaaagaaacaagtaataaataaggaaataaagaaaatctcggaattttcaaattaatgcgaaattgccctgtgtttcaaaaattgtgcttttttgctcatcgcaattattacttaatgctcagctcttctttatcttggggaaagtagctattggacaatgaatgtaccagatttagtcaactcgtgctctaattgcaagtccaagaaagttaaggtatgcaaggaactttattaatactcaaatttgtaatcaaatactaacattatactattataattatttttttcagtgtgatgggaaaataccttgttgtagtagatgtcaaaaatggaattcaacttgtgatataactaaaactgtaatgtataaatattcaactattcaaccattattatttaaaattgaatatttacaaaatcaaattaataataataataataataacaataataatactaataataataatgaaaatgatggtgaatatcatgaagttggttcattaacaatttctccaaatgatgaattacagggtaaatatgttggtgctgcaactggttcaaattttgcaaaattattattgaatcaagttcaattaccaaaacttgaaaatattgataatatttcttcaaataattttattgatatgaaatattttacaaatttgaatattaaatcatttgcaactgtaccaacttattcaattgggaagttcttaattaataactatattaatttgattcaaccctatttcccaattattaatattaaacatttattaattaactttgaaaaattatataaatgtccacaaaatttagattatcatgaaaaatatattttatttatggtatttgcaatttcaagtgaaagatgtgaaaattgtaattatttaaatacttatcataatcaattcaaaccaattgaatattataatacttctcaaaaatattttgataaaataaataatactagatcaattaatacaattcaagaattattaattttatttatttgggttcaatttactaatattttcaaagatgataatggtgattcgtggtatttaggtagatatattatgtcattagtaatggaatttaatttacataatgttctaactgactctttactatcaaatgaagagaaagaatttagaaataggttattttggacaacctatgtactagaaagaacaaatgcagttaagtgtggtagaggattatcattgagggaggatgatattaatgtaccattaccgacatttaatattaatggagaagattcaataattgataataataataataatacaagttcatatttagaaaaatttgaatatccaagttataatgaaattaaatttaatgcattatttatctcaattagattaaataaaatctatactatattattagaaactgtttatatatcaagaacaaagggtcaaattccaaaattaagtatggaaagtataattcaatataaggaaaatttacaaaaaatgatttttgaaataattgaagatatgaataagaatatatcaattgaattaatgtattatcatgaattaataattaaggcatatattgcatcaattatgttaaataggccgtcgccgtcatttttaaatcctgataataaatccattttacaatgtaaggaagattgtgaaaaatcattagatagtttcctatttttaattaatacagaatataaattaataccatcatatttacatgatttagttaatattggattaacaatgaattattgttgtatgaaaattgattcaaatagtgataatttaaagaaattttcaaataaattaattgaaataatgaataaaattattaataattatccaaattttattaaatttaaaaatctttatataataatatcatcaataattattgaaagttttactaataataataatgaaattaatgagatacctaaaccattagtacaaattaaggaacaattaaataatataaggcaagataagcaaaagaagatatatatgagagatccatttaagactaaagatggtagaataagtaaggcaacaatagttaatgatgttcaatcaccaagaggtggattaagtactgcacaatatgataatttatttcaatatcctattaatgaacaaacaaggtataatgagattgatcctgtaacacaagaattatttcaagatgtatttaagagatattatcaaggtaatgatagtgtacaggaggatattagtgaattatttgaatttcaaaaattcaattggaattaataaaagagagattgtatcattaattatataaagctaaataaaataaataagtaggtaaaggacgtttaatatttatgttgggttgtgggggtatttaatgttaatgtaaatgatttgataaattatcatgagacatacttctattcaatatatttttcattgaatcatctgtattattgctattattattgttattgttaataatatttttattattaataaattgtaaagttggaattataggtaatgaagtaaatgaatttaatgagtttaaagaatttaaagaatttaaatttgataatgaattaattgaatcatctttattaatcatataccttattggaggtaaaaaagttttagaagaagaattaattgaattatttgataaaagtggtaataaatttggagattgtaaaggcgttatattattagatgaattaaataaaggatttgtactataatgtaaatttggggaatttggtcttgattggaattttttagaagaatttgatttaattttatcaaaatccaaatgacttgaagatgataggttaattgaagatgatgatttattaagtaaattattcatatgaggtaatgaagttaatcttgaaattgatattgaaggtataaaagatttattataggaagttgataaagttgaatttgagaatgaatttaaattattatgagatgaatttagagatgtaagagaattcgaactattagttcttgaatgattaaaagtatttgaatttgtatttgattgtaaaattgattgtggtacaggtaatatttgagtatttgaaggtattgaaattaaaggaggatgattaattttagctttaatttcaatttccacttcattttctgtctctgaagaagaggatgaggaagaatgtgaatgagacatattattattattattattattatcattaagtaaatttgataaacataatttattagcagattgaatttccttttctttagctaattctaattctttctcctttctttccatttgcatttgtaatttagtctttcttggttttcttggttttctaggttttggattagtatgaattcttaaatgtcttgttaattcatcagatcttgaaaattttttagtacaattattaaaagtacaatgatgaggtttttcaccagtatgagttctaatatgtctagtttgatgttctaatctatggaaagcttttgaacaaaaagtacatttatagggtctatcatcagtatttgacatggttactgaaaggaaggagaataaagaaggagtaaaatataataattaattaaaaaacaggaaaatacccggattattagtgaggaaatatatacgaaaccccacaaagtgaaaattattgtgttacaaaattttaaatttgtgttgcttttgaagtaggtaattttcctctattattttattgttctggggggggtgggtttaagtgagtgtgggtcacggaaaatttttatttttttattttttattagcagattttttatttttttcttttttttctttttatttcattgcattagaaagggtttttccggactattgtgtgcggcttgttttccgtttttagtattagtatggtgtattatattgtttttccgttttgtaacgttatttttttattttttcattacagtatagtttttccgataataataatatatccacacttttaaaattaatacataatacataccccgcggaattattttcctattatagactaatattattttgttacgtaagaagacagttacgtaattatattacgtaatgctctttactcttccccaggtaatattattaattctaataaataataagtaggataataaataataaataggttcttctcatctgttggaaagtaaagtctgtatttatatttttatgtgcagattattagtatacttatactaatacactgacataaactttaacgttaacgttttactagtccatttgttctataagtaactctcattttaattatattttactatgtgtttacaatatcaataatgtagtatattctcgtatcactatcactatcactatcactatcactatcactatcgtattctacacaatacccccacaataccccccacataacctgatgaacattaataattatcaacagaataataatattcaacaaaatgagaatctcggcataacattgaaatcataataccccgaactcttatccttattatcccgaaattattttttgttctgtatttacattgataaattaattaatacatttaaataactcaatgtcttcctaaatatttaccataaattctctattaaacttctacttcttttaacaatgtcagattttattgctcaaaattttaatttaattaaattaaatttattaccagattttaatactttcggtttaccagattttaataaacctttacctcaatggccttttaattttaataatcatttattaaaagatataatttatccaatttcacttaatggttatattgcattatcaatttcaattacttattttatttctgttaaaattataaatcaaattatacttaatagacaattgaaatattttaaagaaaataatgatgaaaaattaaaattaccttcaaatttaaataaattaaaacctgtaccttataaaattacaaattataaaattttcaaaatttttcgtcataattcataatattttcctttgtatttattcaatttggacatttattggtatgacttcaacaattcataaaatttctcatattttagttccaaaattatttaaaaatttaaaatcttatgataattttacaggttttgaattattttggcaaggtatttgtaataataattatttagaaaaaaatttatggattaattataatgatttaaatttaaaaggtttaaccttttatagttatttattttatttatcaaaatattatgaaattttagatacaattattatcttattaaagggtaaaccttcatcattattacaaagttatcatcattctggtgcaattttatgtatgtggtcaggtacaagatttatgtcatcaccaatttggattttcgttgttttcaattcatttattcattctttaatgtatggttattttactttatcatgtttcaaaattaaagtaccaaaatggtttaaacaatcattaacaactttacaaattttacaatttataattggtggttcattagctgtaattcatttatttattcaatattatgatcatattaataataaatttaatagttgtatttcaacaagttcagaagctgcagctgtttatattaatgttttctatttaactcctttaacattattatttgctgctttttacattgattcttatcaaaagaagaagaacattattaaaaagaataaatgaatgaatgaaatgaataacttaacctctataaaacactctctttataatattattaaccccatgtaattattattaatacactaactccggctatgcttttcggaattaaaaaataaaatttcaaattttcaaattttcattatagtgagaccagcagtctgttaacaatctacaggaccaatagcaggtgttttatttcaatatctaatactatatctttaaataatggtactatattataagaataaacatacatataatcataattttgaaactgttacactagcttattttaatcgatatccaaatccttattcaactcatgttaaatcaactgatacaattgaaatttttattgataaaaatggtaatttacatcaattaaaattaattaaaaaatctggtagattaccacaatttattaaacctttcttaggtaaaataacaacttcatggataattgagaaaacaattgttaatccaattacaaaagaattaattacatttaattgtaatattgatcataaaaaaataattaaagttgaagaaattaatttttataaatttaattctaatcaaaataaaacaaattcattcgttttcgttaaatttagtagtggatttacaaataaattctcatttggtttaaatataaaggataaaattgaaaattggtcaaaaaataaatttagtgataatttagctaaaagtaggaaaggtttacaaattgtaatggattcagttaatgaattattattaaaatcaaagacatagacataaagctcaagcaaaacttaaattccaacctaatttcttaattattaaataccaattaataaatttatcaccattaaaatttaatttccaaacataatttataattaattgacaaattaaaacatttttccatttatacctatttataaataattgaattttattattaatttcaattctatcattaaaattaatacaatttaaacctgcaatgaaaattggtaaacataaacatgattcaaattctgatcctaataaaatatctaataatttaattaatttattatttaaatattgaatttcaatacttgatgaattaatttttaaaattaatgttttaagataaatttttaatgtaatttggaaacattcaaaaattgttaattgtaattctaattctttttcatttaaatttaaatcaattggtaatcttggtttaacattattaatcataatttcaattttttgacattcattgaaaatttcataataattcataattttatcattattattattattattattatcatcatctatatcattctctctattaatattttcaattaaattattaatttgtgccaataattggaaaactggtgatgaaattccatgtaatggatcaataaatttaattttatttgaaactaaccacattttttcataatctttaatatcaaaataactaatatttttattaataccaattatatcatgatatgcaaaatttgtaattaaaaaatgttcaactttactattattaaatttatctaatccacctcttaaattaattaattcataacttaattttaaatattttgaccaattataaacatcacctttacaaatttcaacaccacataaaattaaaaatgctgcaagtcttgtattaattaaattttcataatttaatgaataagtaaaatcatctttatcaattatattattattattattattatcatcattgttattactattattttcataaatttccttactatcatcattatcatcacctatttcatcaaattcacttatttcttcaattaatattggattatttttaaatcttttaaatgattgattaatataatatttcccccattttaaccattctttaccacctaaatgaaatgcactccatgcaagtatactataaagaacacttttatcaacatgtgccattggtaagaaagtatttaaatacatattttcatttttaggtgcagaacaaacaataaaacttaatttatccctataataattatataaaaatttatcaattggtgataaatttgccaatgttgtattttgtaaaattgatggatttgctataattgtaagttcattattattattattattgtaactaatattattattattattattattattgttgttattattattattattatcataactaatttcattttcaaattcattacgtttacgtttcctatttcttgatttactattattttcaataattgacatttcatgagttaatttattaatttcatcatttgtcatattttcattaatatattcacatcttctaccaagtcttgaacaatcaccacaaattggtttgatttcatcacatttcttcttccgtaatttacaagtaatacatccatttgatttacgtttattcattgattaataaaatttgtataataaataaataaaataatttaaattaaataagttaaatctaatttatgggggttattaaaaaattaaattcttgaatattggcttatgtaatcaagttgttgaatattggatatattggatattggacatgtttaatagctgtaaatggtagtggaatagtaatgtaatggtatggatatttaattggtggattaaataataatattagaagttattattgatacaattgattgaataattgattaaataatgaattaggctatggtggctcatttttagaaaactatgaaaattcaacttaattataatcaattaaaaccaattgaaaagcatttatatctttgaatattaaataccataataagaattgtttagaagtccataatacagtaatactactcgatacgatgcaattgcaagaagaaagaagtgtgtaaaaggaatgagccaggacgcgagtgagtattatagtagattatagaatttagttagttaataatatattatacatgatacggaattagacattataccttagataatggaattataatacaatatcaaagattttgaaacaaattcccaagatactggatcaaagaatatataagtaccttcctctgcatttgcattaattggagttggatcaatatttgaatcttttgttaaccaaacttgtaattctttatgatatctccaatttcttttatttaattccctagcagataattcttgtgataaatctcttggttttgtataaaatataaataataatgttaaatcatcaaattgttgaaatctttcctcaattattggtaattcattattatttatacggaaagattttggagtttgaaaaattggttcaacttctgatctagcagtttctaaccatggtgatgataattttgttgaaagtttttcattggtggtattgatttcaaatccttgtaaatttaaatcaacacctaatgcatttgaatcattaaatatattatttaaaccttttaatccaaatttatccattggatctgactctttaattggttcaaaatgcattacaggtgcattaagacgtagtatattttgttgttggatctgttcaggtgtcatttctgttggtttagtcattgtttggtgattattgaaggaaaaagtggtggtatatagttaaagattatatacattacataatgcaaattttttcaattctacttatattccatacaatctttttactaataacaaggatgaaactacctaatataataataacaggtactccaggtagtggtaagacatcacatgcagaggaatttgtaagtagacatccagaatttaaacatattaatgtatcagaatatgcaaaattaaatggatgtattgaaggatatgataaagatagagattcatcaattgttgatgaagataaattattagatttattagaaccattagctaataaaggtggattagttattgattggcattgttgtgaaatattcccagagagatggattgatttagttgttgttataagatgtgataatagtattttatatgatagattagttaatagaggttatagtgaaaataaaattagtgaaaatattgaatgtgaaattatgtgtgttttattatttgaagcacaagaaaattataataaacaaatagttgttgaattacatagtgaagatttaaatatgttagataataatattgatagattagatcaatggttaaataattggttagataataataattaattaaatagtttttatatacatgatagttttatttaccaattttaatacgtaaagctctttgagcttttcttctctttcttaatttatgctttttcattttaagtcttctctttcttaaaactgatgtcataatcatttcagttattaaatttgttgatgatggcattgtaataggtaatgtagggattgaaattcggttcaactctattgatcatagtcatcatagatgcagatctagtaaatactattctactgatagtatttatacctttaaatacgttaaatacacgcaacattggttaataaaaggagttatagaagtagtagttaactaattcataagactttccacatagtaaaaaatcatgtcgagaaaattaattttaatttttcactttctatttctatttctatttctatttctattaatgattatttttatgattatttttatgattataattatgaatacttattagaaatactagttaattacttacaatagttgttatagagttatagaattatagggttatacaaaattttatacttatttttattcttaatcttatcatttaatcctttgacttcttcttcttctttttatctttcttttcttcaccttcatcttctgcctttctcttcttttcctttttatccttcttctctttcttttctttcttttcctttttatctttcttttccttcttttcactcttttccttctttgtctttcttttcttccttatttgatgattcaattaaatcacttgcaccaccatttaattttaatgcttccttaattgcatcagaatttttcattggtgatttacctgtattataaaattctaatctatcttcaacttgttgttttaatactttaccgaaaatattatttgcatcatcactaaaattatcaattcttgaagcaattgaacatttatttgctaaatatcttgagattctacctttattttttggacttgctttaccaataaatgatgaatgataaattaaaccatattttggtgtattaccctttgtctttaaagctctaaataatgctttttcagcacctaaaatttgaacagttgaagcagcttgttttgataaatttgttaaagaacctgcatgagaaattaatcttgcaccaacaacttcaccaattaattctgataaatttggtgcaactaaatgcattttatcatttaaataattaaataaattaattctataatttgaaattgaatcagttctctttgcaaatgttaaaatattttccatatcatcatttgaaatatcttgacccattgaaatttttgccatatcaataattttttgagctaaatttgaatcatcattaactaatgaagcaatttcatgtaaattatcatcacttaaattagatttatccttaatatttaaaactaattttgcatatgtatgattatcattaacaattttagctaattcagggaaatgccaaccataccattctttaactctcattgaataagtattaatatctttatctaattgatctaaaagtgcaattgattgtataatatgattatcatttttttgaactgaaaacttaacttttgatcttgaataagcatgacctaaacctaattgagctctctctaaatcaccttcattaaagtttttcaataatttttcaccatgaaatctaatacctcttaataaatcttgaacaatttcatttgagatacaatcaatataagggaaaaattctttaattgaaggacctaattgtttatcagatatacctaaattaatttgatcttttgattttgactttggaatatttaattcaataattgatttaagataatcagatactaaaccttcactaatatcattagcattttctaaagcttgagctgcacctttaaatggagcaaaagattgtaattcaactaattttgaaaaatttgataaatcattaatagattcttgaacatcctttaatcttgaaccgatattatcattttgtaatttaactttaaaaatagcataaccagtaggttgttcaaatagaaggaaatctacacctgccattgttacttgattaaagttatttgaataaaaaggataaaatttacttgtaaaacttataaaaaattaaaaaattaaaaaattttccaaaatgaaaaaaatgctagtatagtatgctctctcttattgaattaaatctcactaagtggaaagaaagaaaaaaaaattttttcttttctttattatgaaaatttaaaatttaaaatttataatagtcgcgtctattcctgatcacgtgacggttacgtaataatagacgcagtcgactcatcgactatttataaatataataaatcattactagtaataacacttccagtatctaaatcatcaactttaataccgtatttattacattccactgtcattgatgcctttaaactcttctctgcaagtatagtaacctttttaggtattatattctcaataatcttttcacttaattcattgtaaatataataattattgaaaattggtattataatcattatctttattatactaccatctcttatttgatatattggtaaatctcttatatcccttttaccatacatacttacaatcttactactattcttattaacataaacttgttcatattcatcatattcctcttcttcactatcatctccttcaccataatcttatatttacattaccaatcttctttttatctctatattctttcttaccaattaatttaccctttaattgttcactaacaataattaattcacttccctttatatcattatcagtagtgatactaatactaatttcttcaatatctttactatacatttcatatgttatattagaataatcatcttgaataatatatcctggtattctactctctttattctgtattatctgttagtattgatattctagcttattatcgtctatactctatatacataccattgcttgtcttgtttaataaagaaaacgaatggtagtatatatggtataaattttcctcacatagtaaaattaattttccactattcacccgttttttcatcaaatcatcatatacaatcatacaatcatacaatcatacccaccatatggagaatataaataatttacaaactaaattacaaacacttaattaaatcaagaactcaacttgaaactcaatatcaagaaaataaaattgttttagaagaatttgataatttaaatgaaaattcaaatatttttaaattaattggtccagttttacttaaacaagattatatagaagcaaaggataatgttaataaaagattagattttattaataatgaaattgaaaatattgaaaaaaatattaaacaaactcaaaatgaattatcaagtctttcaagtaaactatcctctgcttaattgacttttcaataaattaacaatactaactgcattaaagaaaatccattcttcaattgaattataaatatatcctgcagtttcaatttctttcaatttagaatcaacaaatttaaatgtatcctcaaatcctttacttttatcattaatcataaataattcactttgtataattaatccacttacactaattctctttgaataccatgcaaaatcattacttttatctcctgaataatatgttaaatcatctgataattcatgtaattccttcattgattcaattaatctatccttattaatcaatacatatcctaataatccaggtaattcattaataatttcttatttaatgataatctatatttaattaaacttcttaatctatcaatttctttactattattattacccataatttccctaaattcttcactttgagctaatttattcaattcatctctacatttctttaaatgaaataaacataattccatcttaacatctttactattacttgtaaaattaaatatacctcctccattaataccaaattctttacttgctaattcaatacttttcttattaaatccatattttggtacatattcttcatatgctttatttaaaatttgattttcaattttatttaaatcaataattgttggattaacatgatatatagaatgaaattgtctaatacctttaattcctctattaatcatacctttcatactcatttcccttaccttaaaggaaaatcatctcattatagcaaatagaaatttctcagcatgaatttttcaaatttccttaataaccctttctttattcatgaattactttattgaacgattaccacgtttaaatacattaaatatctatgtttcaataaatataacaaatgtatcattaaatgataattctatattaataaataattcaataattatacctataaatgtatcaaaatcaaataatttcgatattttaccatcatctaatggtttcacagtgtataagaatcaaaattaataccattccaatcacacatgatgataatatatatgataaatataaatggaattataaacaattaaatacaattctcaatgagtcaacaaataattcatcatttaattgtatttcatgtaattctaaattaattaattttaataaaattaaaaaatttttaccaatgccatctgaattatggtatgaaatgttagattattggcattgtcataaacctaatgaagaagataaatcatctaataattctaaaattttgaaaaaatttaattccttaaagccaataactaatggaattattattggaacttattattttataagtaaatccatcagattgggggttgataattaatggaattgatgaaaataaagatattcattgttcaaattgtgatcaattattaggttcattagatgaaaattcaggtagttataaattactcaaatggaatttaaaatgtaatgatgaaatatttacaaaatcttcatttgttacaattagattattagaagaaattaattatagtgcagtacgtcaatttatattatcttataatgatattaaaataaaagtttggtgttttggtgtggggattgatatttcaattaataatcgaaattataatgattgtttgaaaatattgtttatggaatataatgaaacctgttgatagttcaataccaatacttgaaattacatatgaggaatcattaattgaatttattaattcattgaaagaaattaattcagaattaccattacctttgaaaaattttaaaaactggtatgttagttatgtaaagttagaatagtatatacacaatataaaaaaaagttacaaaatagaataaaatagaaatcctaaaaaatgaatcttttttaattctttgaaatagttggtaaattaatattttcaatatcgtcctctcttgataatgatttctctaatgatataacatcttcaggagctaaattactctttggtccatggaatgatttatatttataagtaaagaaataaatcattgctaaaatccaaactccaaaacttaaaacaactgtataattcatatcagttttatcaacaacttttgatgctgggaacatacaaagtaacataatgaaagccccccataaacatgaaattatattattaattttagataatttttcacctaaataaaatgaacctggtttgaatttatccttaccatacattaatttaaggaaaattggtgtacaccatgcaagataacaaccacaaacataaagtgtaaataaagcatttgcagctgcactacctgctaaacataaacatcctaataataaaccaattatacaacttaaaccaactgctctcattggaacttttaattttttattaacaactttaacaattgaacaaaatggtaaaccatcatctcttgcaaatgcccaaatttgtcttgaacatgcagtaattaatgatgatcccattaaccattgacaagctgccattaatgacattaatgcaactgcccattttttacctaatgaatcataaaataattgagcaattgggaaacctgaacctgtatctaaaactctttgaatatcttgactaatacatgcattaataacaattataataatccaacctaataaaccacaaactgaaattgaaccaataataccaattggaactccataagttgcatttttagcttcttctgacatatgaacacatgaatcaaatgcaccaatagtccaaactgctgtcatcattgataaacaaaattgccaaccttttgtccaatctgaataatcttgaactttactgaaaataaatgcaccatcattaaatccacctaaattaacttttgtaccaattggaacaacaattaaaaataaaattaataaacctgtatgactaattgatgaaattgtttgtaataatgcaacatttttagatgaaacacatgttgcaataccttgaaatataatacaagctgcgaaaacaccataagttttacctgttgtaatatcaaaattaccatcttttgaaatataaacatgcagctaaaatttcctcagcattaccataagcaacagagactgcacctgcacttaatgccattgtattagttaaaccaattaagaaagataatggaactctataactttcaggagcataataaaaagtccaataatataaaccaccagaagttggaattgcactagctaattcagacattgaaataccaattgataaaatgaaaactgatgcaattaaccaagaccaaagaaatccagctggacctgaagctaaacctgttgcagcaattgatgcaactgatggtaaaatacccataattgaataagaaataccgaaaatttgaaatgttgaaaatcttctctgtaattcttgtttataaccaatttcagctaataaagtttcatcattttgagctaattttggatcaatttctgcaatatgtgattgatgagtattaatctcatgcatacgagatgttaaaggtgataagtaccgaacgtgttggacgaagtgacattgtttggttatatatgatagttgtctgtgtattaagatgaaattatgttcttattaaaatagataacgaaaaagatgataaagatgatgaatatttatatagtagttattaatttatcatatagtgtatgattcattaatctatataaatcactatatcataactacaacatcttatctacagaacattatcatgaaaaggtagaaatggtgatgtaaagtgaaaaatttcttaaatttcttatcggtaaaaactttttccactcttctcgcccaatggggaaacttgatgcactgataagctcttaattattattaggcatctataactgatacaattagcggtgctacctgtttacgagatgcacttgttttccactgtttccaccatttaccaccatttgcattaattctattgtcttcacttaattgtaactcttctcttaccgatttgataacgtttccacttaatttaccacttgcgttaatatatctgttaaattcaccttctttatctgtaaatgatgacataactactaataaatcaatctttctatcctttatccattggtttaattcttcttcaattttatcgttaccgtatctttcgattaatacattgggggaatctgtacaactagaaattccaatcttgtatttatattctccattaccgatattatcccattctttataatctttacctaatatatcacgtaatgaaaatccaactgtactgttcttctcctctgaaagtttctcaaataattcttttgtagtggtggtgtttgtattggtactaatatcaccgcttaatattgtaaatgatgatttatcaatgttttcaactcttctctctaaatttgatgtatctaataataatggtgcagttaataattctatttctgatttagataaaattggcaaacactgtttcatttctaccttcatataatcccatactaaacttgaacatgatccagatgtttgtataattcttggattagcatctttaaatttctctaaatcaacgtgatgatcaattattcctacaactttataattttcattagttttccaaaattcattatcaggattattatgatcaactaatgttaacgcatattctttgttatcattatttaaatcattaatgaaaactaattcattttcaggttttaaaccagtttgatttaaagcatattgaatatctctacgtaattttaattcactctgtgggaaaactaattattggataaattattttaccagttttaataaaattcaaatatgaatatcccagtgtacaaactacagaatccatatcaccacttgaattacccataacaatgttaattatacttaatgcattcctctcatttaagaatgacttatgtgcatatcgtagatactctactaatcctatcattgtttacagtagataagatactctattacttctttaaagaaccatcctaatggaattcgaatcatgttcatcctaaagtgaaaattttattctacaaatccactctcttacactctttaagggttattctacgttttttacacactaaaagtaagcaccactactaactcctctaatcacatatactaccacatctaatccaacactgtactctcccaccacccctactcaacctccaataacaccttcccaaccctatgtagtaacactctgaaagactctcccaaataggcaactaaggcggccaccggtaccggaattctcaccactcagtctggcggtctctgatttcatgacatgaaaaatggatgattcatcaatcatcttaaggtctggagagttgtttcttaagataactactctattgagacaatcgtaaactataatgactgttaatattgctgttattggtgctggtgttgttggttcctcctttgttaaccaactttctgctgttaaaggtatatctgctaatcttgtctatattgcaacttctaaaaaggcaattatcagttcagattattcatcaattaataaaccattagaatctttaccaaatgctgataaacaacctttatcaactgatgatttaattaaatttcttaaaggttcatcaaatccagcaattttagtcgataatacttcaaatcaatcaattgctgattcttatccattatttgcaaagaatgaaatttcaattgcaactccaaataagaaaggtttctcctcatctcttgaattatggaatgatatcttctctcataaaggtttagtctatcatgaagcttcagttggtgcaggtttaccacttatttccccacttaaggaaatgattcaaactggtgatgaagttatctcgattcaaggtatcttctcaggtactttatcatacattttcaatgaattctcaactgttgctccaaataatgaaaaatttagtaaagttgttaaaattgcaaaagatttaggttatactgaacctgatccaagagatgatttaaatggtttagatgttgctcgtaaagttacaattttagctagaattgcaggtttaaaaattcaaaatccaacttctttcccaatttattcattaattccaaaacaattagaatctgttcaatcagctgatgaattcatgtcaaaattacctgattatgatattgaaatggataaattaaaggaagaagctgcatcaaatggtaaagttttaagatttgttggttcaattaatgttcctgaaaataaagtttcagttgaaattgctcaattcgataaagatcatccttttgcttcattaaagggttctgataatgttgttgctattacaactaagagatatccaaatcctttaattattcaaggtgctggtgcaggtgctgaagttactgcaatgggtgtcttaggtgatgttattaaaattgctcaaagagttgataattaatttctttagaaaatgtttacttttataaatacacaaattaatctaaataagttcttcattattctcatatgcttcaactccttcacgaaatatctcccttagtttcttttcatttccacaaatttcacggaattctaacataacactctgtgaatcaaaataaattgccttacgtttaccaagattatgtaatttaccaatatttaaattaagtctggaaatatgtgcattatttggtgctaaaaagaaatctccattatttcttaattcagctatataaccaccagttgaatgaataaattgtgcatatttaaacattggtttaccccaactataactaacatcaaattcatcatttttaaaataattagcagttctattatcaagcataaatgatcccctttttaaaagatacaaatggaaataatatttctcaaattcaaatattttactatatttggaaaattcatcatcaatccatggatttaatgctaaatcaatttcaattgttgaatgtaatggattagttataggtaatgtaaataattcatcccatggaatttcaactaatgataatccatatctttcacaatatttactccatccatttattaaatcttcaattaatttactaggtggtatttaaccattcgattctaatatggaaacaatgttcaggattatgaacaatatcataatgaactttaactaattcaggttgccatgaatatccattaggatctaaatcacataaaacttctttacttaaagtaattgtctctcccttaccagtttgtgagtctgcgctattgattttatgaaattccttaacttcaccaatatcatctttaatatctaattcttgacttgtaattgtaccacttccagagacaccacttttaagtgatttctgtgattgaatggaatttctatgactatgatattgagcttcataattagcaaaatttgttgcctccttcggttaatttcttattaaaatagtagaaataatgaccatctaaaaatttatgtgttgcaactgcatgatagaaaacattttgttccatcaatgaattaccgaattcaactgccttcctctcttgtatctatatcttcaaaattttctgttaaaaagctaactaaatccataccaaggaaaacagtattgatactttttcaaatgccagtatctatcaataactggaataccttcttcagctctgtaaaatattaacaagttttaaaatattgatgctcttattatacttatggaattgtgatctgataattggagagttcaatgttgagatattattaccactattacttgatgaggcagttttaacattggctaaagatggtaggccagtgtacccatttgccttattctttctcatttcattggattcatgtcttaaatattggaataaactaccagtgtaaaagtaaatctctggagaaacttccagctttttcttaattttcttttcctcattagtacggaatcttatcttataaatattcataatcagtgatctaataccttctaatctaatttcctccgttgttaagttttcattggtaattgaataaacattttcaggtatctcacttggtaaaatgacaaatttcattctgtggtataatttcttatctatagactcatcatagccagctaaaacttgatctaattgattccaattataatttttagtattgtattcatttttttgagatatcaaaacaggtaaatactcttcagaatatcttgtacgtatattctccaaatattgtttatctgtggtggaaattgctcttttttcatcatcatttgctattttcttataaacttgaacattaattaaaccattgaattcacaacaaattctatgaatctcgttacttaaactcaaataaactctcttcccatttatgttagcagaattatctaatgattgtatcagtaatttaacatcaccattcggctttctgtgtttttcaactttttgtactttctcacccacacatatttggaaccctagagttaatctcaatgaaatcatacttttcatcaatgctgtatttgtttggttttcattcaataaattttgatttagtataacgtcataaattctaaatgtatagttttgattgaaatcactgagtgatggaaatatagttgtcattgtaggtaatgatgctggtgaacataaagatgtccatttgactgacttcttacgaacatttggtgggaacacaaacttccatttaccgtatgaaataatattcagagaatcaacattcaaaatatttgaaggattagttatatcaatccaatatgtattagaattagtttctccatcctttgtattcttctcttcgcttttcttcttatctcttgacactgagtttcgtcttaattcattacctgaaaattgaagtgaaaaattatttttacctttatttaaaattacatttctgttactctcgtgtaaatctatgttcagtgaatttgatgattttctagaactcattctttctgtactttttctggaaatatcttcatcaaagctatcggtttcattcaagctaatcgaatcaacatcatcacctctaattctaggaagaatttgatgctgtctttgatgatacggaggatgttaggtcggctgttctgggttttaacattggagagctaatcatctttttaacataattaatagctgatgcagaactagattcagtattggcatttttagataatgataataatgttgaaaatgcagaaacattaggtttggaagttgtacttacaccaaacacagtactagttgctggtgatgatgttttatttgaaccaatcagatcagctggcttaagaccttcatcggaattattttcaggtgtaacactttttcgtgagctcaaagaagacacgtttgaaatcagtttttgtttgtgttttggaattattttcttttggtcaactattggatccattagcttagctgaatcaaaaacgctatcatcgtaattctgcattgcttcaatcattgaaccatgattagaaagatcaagttcacctaagttcaaattagataactcattttccattacccccatcatttgcaattcatgaattctgcattttggtaaccattgatggactgcttgactgctatctgtccaaaaggagatgtccaaccagtgaggaatacaatgttttagtctattttgattatcaaggaatcttactaagggaacgacatgcaatggttgttgactcaaacatattatatcaactgtggaatcaactgtggtcattatcttacttgttttgatcaacatatcatatgaaacatcaaataaacctgtacctggcgtaatcattataaaatggtttgttgtttgtcttaaatatgagtctttgaaatcatcagaaacaaaactcatacccaaattaatagcttcaagaaaagaacctttcacagatggtaagatagtaccttgaataatatactcctgtggatgttctgcatctctatgctggtttttatgtaaataaacatctcttttaaaattagcaaactccaatctcagtgtagccataatttcgttccataataatatatgaacttgatcaacaacaactctgtaataatcggatttatttcctggtgtctctccttctgaatactttatattttcaccatctaaatcaacactagtaaataatataattgtaatcaaatgatgagttcccatatccctccatttctgaaaaacttttggaaaaaatgaattgactaaattatggaacatttgttgaccactctcttcaaaatgccacatttcagaagatatctgtataaagacaattaatctagctgagtctgatcggaaaacaactttagtgtccttacttatgtatgatgaatagtatttatggccatttttatatattttattgatactcagtctaattgatccattaagataagatattttttgatttttgtaaacacattgatctgctatcaagttggatatatgccacatatctcctctagacaaatgtatatctttgacataaatttcaattgtatctgcttgaactgcttctcttgtcctcactttaacagcaacttgatccctcggctttaaatttaaagtggaaacaatagatcctgataagattgatataaaaccacttggagcactgtttgattcatgcaatatagtttcaagaattggattcatagcagttgtttgtcttacattattatcattttgttcagttctggaatcattgaatgtattttgtgaattatccgtcggcgttgcaacttttgaatcaagatcatggaaaacaaaaaagaacttcttcttggaaccactaagacattgaatttcacctaaatcaccagctttagcacctgggacactttttggatcaactaaaactgagtcacttgatgttctagcttcgtgaaatttaacagttaaattgacggaattgtaaattgatggtgaaacagaattttctgtaatagcagtagttggtaatgtacttcttctactcgtctgtattggtgtattaggatctgattttctagaactcgatactttggaagtacttgtattggctacattgatactcagctgtggtttgttattacgagcgttatcttctggatctttgtttcttccaacaattaaggtggcttcattagttctttgactcaatctcgatcgtgagttggaaaaatctatattcaatcgtttctgtctctgcgatgacatgtaattatggttgtcaatggggcacctatttgtggaatcagaacgttcgtggagtaaggttatatgcattgtagtctgaaaattgtgtgtataattttctcgcagtataaaatttaattttactgaatcagtcattctaagtattatcgtgatgattacatctaatcatgttaaatacattattatatacataaaatacacggatggcactataattagtatgagatatatctactgttatttatcttacctctaagaatggtagataaagactttttagaatttaaatttgtaaccatggatgtaattcttgatactggttgtttcttgatatcagaaatagataagataggagatgaatttccacctgaaccttccaataatccttttttagtttcttcctggtccttaagagtttcaaagcctttaacaatatctgaaattgtttctgcatggctgtaaagatgtttttgtaatgaagaaataactgaattgattgttctttcatctctaacaactgcttctggataaatttgactcttgagtaacagaatttcagattgaacagttctatcgatatcttgtaatctcttaatatttgctcttagtttacgacgtgtttgaacattttcatatggtaatggtctatcgctattcagattcattttcttttggttgatattatcatttgaaattttatccaatgcttccttgtaagttgaaatatttttaaaacttttgataatagtttttcttaattcatctgcattagcatctaactctttataatgagcagctatatcatcatatgcatttacattcttttctgctccttgtaaaactgttggaatttcaaagagtctccagaaattgctataagaagaggaatttttgagagtgtggaataataaggtatcattagaatgatccgcaaaaaatacatttagtgaatcaatatttttgtgaatgattgagaagttgatacaaacatcatagattaattttttcatttgctttcccattgaaggtaatttttcaaactctgcaggatattcagttttaccacgagcgtgaactaatggaactggtaatggaagataatgttgactaaaataaacttcatcatctaaagatgttgttttttctgttctcatatgatcaatttcagtaccaattgaagtataatctgggctacttgatacattgaagtttcagatgttgcagcaaaatctgttgatttagaatctaatgatgtagaaacattttcaagttgatattcagtagatttttcagtattggaagattcaaatgtagtgattgttgatgatttgaatgtcaaattatcggtgtctgtgttagattggaatacatcgtttttaaaatcaacagtctcttgagagtatggaattgcctcaacagtttcattgatcataggtttaggttcaggtgttacatcatcttcggctgatacttcaaactctaattcttgatccattatttctctaggtgagtcggcatattcttcatgattttcagaacctgaaacatcatcctcttcttctttatcaacaacatcatctgcaaacattgatgaaagtgcagcagatttgttcactggtttgaccttgtcaactggtttatcttcttttgaatcagcaatcttttcttcaatgggaacagatttttcattaacatctgcaatctcttctaccttaggttcagccttttgttcatctgtgcttattgggctaacaacttgaaatgattcagctgaagagtcagcagatttcatttcagtatctatgtttttctctacacttgtattttctggtgctagtttttcatcttttaatgactcagttgttgatttatcaatattcgcagcatacgcatctaacttttcttcaattgaaataacgttttcagtatctttagttatttcagatgaattggaatcaactggtttagtttcatattcattttcagatgcttcaacatcatccttctcaattatttctaaagatttttcagaatctatagatgaagctttttcgagatcttcagaagttgctccagctatttcactcttgataggttcattggatgtactttcaacttcaatttcatttgtagatgtttcaacattttcttttgccgtttcgtatatagcagattcaagaacctctttgtttatttcatcattagaagtatcacaaatttcattaatttcatcttcagatacttcctttgctttttctttgttctttatctcagtttcagtatttgatttaatggcaactggttcagcttcttcttctggttttttttctttgacatcatctgcttcttcatccgatccctcttcagctttttcttcggtcttttctgcttctttttcatcttcaaccttatctttaaccttatcttcaatcttatcttcaacctcatcttcaaccttatcttcaaccttatcttcaatcttatcttcaaccttatcttcagctgtttcctcggctttctcttcagatgtttcttcagctttttcttctaggttctccacaacttcttcttcatcatttccaatatcaatagtttctgttacttctttggtatcttcactttgttgctttttggttctcagttctaataatgctgatctcttgagtgcacgttcctcttcttctttctttaattgtgcttcaatacatttttcttgttcaataaggttcaattgatcttcattagcttcttcaatttcttttagtgtagctttaataaattcacgatcttttaactcattttcttcatgttctttttcttcttttcttattctttcttgttcatcaatttctttttgaactcttagcttttcagcatctctaattgatttttcaagttttaatgcttcaattaatttttttctatcttcatcagcttctttgaaaactttatcattttcttccctaattttaaccaaatttgctaaattatcttcatgttgtttcttcttcattaactcagcattctcctctttttcctttaatttcttcaaataagcagtagtccaatcttctattattttattgatatctttatattcgctatcatatattttcgattgagcagcaagaaaatctttatatgctttctctgaaccttcaaaatcaagttgaactaatttactcttgatcaacattttaactgctttttctgcatcattcttatgttggaaatcaaattcatatttaaaatcatctaattgttcatttaatggtaagtctttgatagattttgctaattgtggtatttcatccttaattatcttaggttctgaagaaatgtttgattttattggttctggttctgggactgtttctgaagcagattcataatcagatgtatcagcatcatcctcttcctcactttcaaattcttcactttggtctaattctgcaataattttcttacttgaagtcaaatttaggtgcatgtaattgaatgatttcatcatctgaggtttcatctgacgtttgatcggactcagattcttcttcttcggaatcaaattctcttaaggttgtgtttgcaacatctggtttttcttgttttggtgaatcattgaagcttaaaacaggcttggatccattgataaaattggttggtttgccaaacatatttgaggcttgtgtattcgaaaatgcagatggttttgaggaagttggaacatcacttggtgtagatttagtttcttccttcttaggttgagataaaccagcaaaagggcttgattctttcttatttaatgataaaccaccaaataagtttgaagagttattaccgaatggagaagcgccaaatggactggaacctgtagtttctgctttcttttcaccaattgagaaagagccgaatggacttgatttattttcagtggagccaaacataggttttgcttctacagttggtttattcaaacctccaaatgaacttgtcttgttttcagtagagccaaatatagatttcgtttcctcaggtagatttattacttcccgctaaacttccaaatggacttggtttactttcagaagagccaaaaatggttgaagattttgttttcgtcagttggtttattatttccagctaaacttccaaatggacttgcaccaccagcactcatattaccaaatagtgaactatttgtattacccagtgagctaaaagcattaccttgagatgaagattgtgcaaatttaccaaaacctgaagtttgattcaacattgaacttacaccaaatggtgtggatgttgatgtttgtgttgatggctttgattgattcattttgaaaccattcatactggagccaaatgatgaaccaccaaatgcagaattagatgtatttgttgttggttgaccaaacattgatccaccaaaaagattgtttggtttttgttcagtttgtggtgtggttgatggaactgtaggtttaggtgtgttggatacaggtgttggagctgcagttgatacagatgatgaaacttgaggtttagtttgaccaaatggtgatgaaccaccgaatggattagatgtattattactttgaccaaatatagaacttgaagtttggccaaatacattttttgatgttgtggtagatcgtgtttggacaatatttgaggcttgttttatttcagataaactaatttgtggagtactctttattaaaagatttttagcctttgataaatctgtctttttattaagaatatcattctttgaccaaacattccaagaaattaattgacctctattagttaagataataattcttggtaaaggatctgattcatcaacacctttacaatggttgtttaacattaacatttgaatttaaatcctaatataagacctaatggagtatcatcatcacctgaatcatcatccattggcattgttgctctatctgaatcatttaataattctgttgtttgatttggaaagaaaagatctatatcaattgcctttgaaccaattgagattaaaatttcaggatattcagttgaccatttatttaataataatgtataaaatgatgcaattcttggtattgcaccataaggagcatataaaacatcagttgatgaggaatctataagtgaaagattatttggatctaattgatagaaatatgttatatagttattagtttcatcagcattaatttcttcacctgcaattgccataagatatttatcatttatttgttttaagaaatagatgttataattttcctctaattcaatatcaaatgatgaaaatggtacaaagtaatctggtacatttgaaaactgtattttagaactatcactatctttcaatactatattatcattaaaccaagtagctgcagttgcgttagttcttaatctatttggagttggacatgtggtagtgatatccatgaaataaagagaaccatttgtgaaatgacataatgctaatgattcatcatttggatgaggtaatattcttaataatgaagatgaatcatcgaatgtataaatcagttgatgattataagtaccatttactaaaatatttacatcaactgttgtaattgagactttacctgtattagaatcagttgatgataggtaaagtgaagattcattgaaatttaacttaatatgtgtaacatttaaatctattgggaaactatataaaacagtatcaatattatcattattttcatttgattctaagaaatttgataatttatcaattgaaactaatttaagattatgatttaaataagcaaatataatacctcttgaataagaaatatctaaataattaactgaattttcagataggaaagatttcaattgatcagaatctatatctgtgaataaatcaacatttggtcttgcttggaaacccaaatgctataatgaaaaaaaagtttaaaaagggaattgatttatgttagtaatttgaacggttaggaagatgaaaaaatagcttatatcatgaaaaatgttaaaaaataaatacatacttctatttccacagtatcagtctgtttcattgagttgattagctgttaattgtatataaagtaaagttatttaaagtgtttattgtgtcaattatttgagagatcaaaccaaaatcatgtaaaaacatgaagggtatatttgttacacatagaaaaaaaaatattcttcaattgtggtgtacaggtaaatattaataaatctaaagacgcgtctgctgcaccagccacttataaaaacaaaaaatactgcacccgccacatgtcatgtgattggtcagaaaggcccttagtgcagctttcatagcggaaaatttattccgtttattgttatttttcattatcaagggtttttccgacaaaataataagatgattgttataattttaaggtacagagtcaatgattataatacatttttaatattttgtttgcttgtatttataaatgagatttgatatatttattatgatatattgaaaagggaagggaaaggggtaatgaaaatgaaaatggaattgaaaatgatatattaataaagaaaaattacataataatttgaggagtttcaacattatccttaatagatttatgtggtaaaactttaccaccattgatataaacttcatccttaactgtaacatcttcacctaaaactgtaacaccttctaatcttgcccatttaccaacagttgacttcccaaccaacaattgttgatttaatcattgcatgatccttaatttcactatttcttaaaattgttgatctaacaattctaacaccatcaccaataacaacatttggtccaataacaacatttggaccaattgaacaacctttaccaatcttagcagatggatcaattaagacattatcaccagtgatataatcttcatgtgaaagttttggattattctttttagtttgagctgctaaatataaacacataccagttaaataatcttttggttgtccaacatccatccaataaccttgtaaatcaaatgaatataatttcttttcttcaactaaaattgggaaagtttcatgttcaattgatgttggtctcatttcaattaaatcaataactgaaggatttaaaacataaatacctgcattaattctattaccaacgaattcaactggcttttcaacgaatctatcaattctatttagaacatctctatcatgaacaataacaccatatttagatggttcatcaactttagttgcaacaatagttgcttcaccatcatgagcattatgaaattctaataattcttttaatggatattcacaaataacatcagaattaagaacgaaaattggtgtatcatccttttgtaaaatattagcagctaatttaagtggacctgcagtacctaaaggttcttcttcaacagagaaagtaattgaaacaccatattctttttcatatttctttaatgcaccaaccataacttctggtttataattaactgcaagaacaatatcagtacaaccagcatttgctaaagcttcaatttgatgtaaaatcattggttgattagcaaattcaactaaaggttttggataagataaagttaatggtcttaatctagtaccataaccaccgacgagaattaaacctttcatttttaatttatatagataagataatttgacttaacttgttcaacgaaagaagagaagaaataaaggagttaaaaagagagaggagaaacaggaaagaaagaaggaataaggaacaactttaaatgaacagcacaaatataaatataaataaacgtcgacatttgaaaaaagaaaaaccacgtttcaacaacttttcaaaatagaacgccaaacagaaaaattgtcgacaacaaaagaaacgcgcttttttcttattttgttgctatatttgctattattattatctagtattattattattattgtttaggatcctttattaatacaaagaaagtaacttagaataagatatctatctattgagaaactccgaaactatctcattgaactcttcactattatccaggtacatgttatgtcctgcattacttatctctctgtattctcctttactagacactctactaccaactttaccacattcccgatacataaaatcgtgttgtccgtaaacccataacatcatcctattttcgcaaacgtgtggctgttgtttaattttatcaattattgggaatttagcaacaatagtactatcgaaaactctcataattgcagtttcggcaaatgatgcacgtattaaacaactataattatattcaataaattttttaacttcatcagaatctttaatattaccacttcttaataatttactaacatttctatcataaacaatctttggtcctaatggtcctaaccatcgaagaactgtgaataatgatattttcatattccaaacatctcgaaatttcttaccaattaatccatatctacctaaaaatccatatgatgtaatagaatttgatacattcatctcaatttcaccagtttgattctgatccttatttgaagaacatataatactctcatataatggattagtaattgcaaatggacttctctcaaatccacctgggctaaccattacaactttattaactctatctggatatttcattaaataacacataccaacatatccaccaaatgagtgtgcaattaaatcaaatttatcgattccattcaattccctccatctttcaagactttcaacgaaaacatcttcaatctctttaataaattctttatgatgatataaatattcaacaacatcttcccttttaacatatatcttggcattatcaactcccttttccttactacctcttctaatatcttcttcctcatcagaacaactacaccaatgtaaatctttactaatcttaccatctaaatgacctccacaattaatacatgtagaatattttccccatttaataccattggtacgaatatctaaattacccttaacttcactctccttattaaatctaataattggtctaccactcaaaccaaatccaagcatatcaattccatgtataattgtatctgaattcattttatttgcaatacctccataattcttataaaaccatccattacatgctccatatccatgtaagcataactacatgctttcctattttcattcccattattactttccttttcaacacgtaattcattaatataccattgatcagaatcactaaaatcaacacctctatcttccatattatccaatttagtaacaacattataagatcttaatgaatttatatttatcctctattaattgattatctctataactaggaaatacgtatttaaagaaattatccctggttatcttatcaccatcatcataattcatcatctctttcatccatactttagtatgaatctttccatgtaaatttgaaattatctaatgcttttcgaatagtttcttatagtaatcactctacttactactctattcattttcattaccattgttgtcatgttctatatcatggtctattaacatcaaataaacactgacaaactacccttcccttaataaataacttccaatggtaaaacttgaaaaactaatcatggggacggccccgccttttcgcattatcggaataaccaatgatagcctaagtctactattagtacaagatatacatgttataatttataaagaatctgttcataattacttagaagatacacatttaatatccttctccattgaagttagtaaatccagaaagtaagaaaactttgtagtatgatttcttacttatattattacaaaattcacaacttgaagttgaagatgcatcaacacatgaacctgcaaaataataattatctgcacctgaaccatcaaatccatgtttaaaataatcacataaaatagttttctgtaaatcttcaatactactaaattgtttttgaaacatttccttaatatattcatccttggctaattctggtatcatttcaatacatttatgaattggtattaaaattgttggaatttgaatatatttatctaaaaagaataatgcatttggaactgcatcatcacctaaatgaataactggtataccaacccaatattcaaaattagattgacattcatttaaaattgaatacattttcttatataattttggacatgatttaattctttgaaatccttgacctgtatctgacattctataatttgatccatcaaataaatcaaaatcagataaataccataattcaattaagtctctcataacataattccatagtccaagtgcctgtttaacatataaatattgtttttcatgattatgtgttaatcttgatccattatatccatatttaatacctaatgaatattttggatcattacctgaattagtgaaaaattgttcaagtttatctaacatattaataacaggtattctattcttattagtatatgaatggaaatcaccaattgaataaagaattgttctaatttgctctttatctaacccttctttatgatgatatttattggctaatgtttcaattgctctttccttttgtttaattaatctattgatcattaatcttgatttaccttcaggtctaatatctgcagttgcatctaatattaataaatcattaaacatattattagaatgatcatttgaattttcatttaaatatttttcaattgttaaaattggcttataaagatcaaattccatttgttccttaacttgttttaatcttgaatccattataatataacataatttaccataagtatctctcattctttcaggattcataatcttatatcttctaccaatttcaaaaactttttgataccattctgcattatcaacaaaatctttatcttcaattagtttttgtccaactttcatattggatgaaacaactaaacctgctaaaatcgaacacatttcctttaattgagtaattattctcttagttttggatgtataagatataatatcaactttatcagtatattcagaaactgttaatgcagcttctaataattttaataattgtctttcatcatatgaaagtctcattggaatgaatttaatatttttcttaatcttctttaaaatagtactatggtcattaacatttgtagtttcttcctctttaacatcaacatcctcatcttcctcgtcttcttcatcttctttaatttcatcatgttttccgtcttctttattttctttactaattgattcaattccttcaatattaaccaatgttgtaaatttatgatctttacgtttaccacctctatgaacaaattggaaacaaactctacaataattttcatcacaatcattacaatgtaattcttttggcattcttaaacaatcaatacaaacctcatcaggacctaaaggtttgtcattgttatcaattgatgaatcttgttcgatatttttcaattggactttatcctcgtcatcattggaagtctccaataattgtgctaacgtatgtttttcttcagaagacatagtagggcttttatcagaaaaagtatatcagagaagaagcttattaccaaaccacggggtgtttgttgtggaaaatttccaaaatgatgtttccttcgcaacaaacagtctgtcgtgaaaaaatcttgaagaaacagcgtttactaagtaaaacttaaattttcatagtaacttgaactccgacagcgaaatcaaagggtcctaatagtaataaatacttacggaagaataattacaattgtagaagtaatataatttacaatctaacttgctaccattttaaaatacattataagaactagatccaaaattaatacttctatacttatcactagtagtactatttaaaacagctataaaacggatctaattgaataaggttttggcactaattactagtgcgagtcttagtatgtaaaaattacccgtttgggactagtagccctaaaaaaaatttttttctccgtttcttttttttgtgtcgtttctttttattgtgttttagtcaaaattaagcatctattatgactaaaaaattttcactttcaatgactttaaaatttattttgtttcatttagttgaatcctatccttccttttcttatttatcaactatttttaactatttttaactcaattaaactcaattaaactcaattaaactcaattaaactcaattatactcaattaacgatgtccttgtatatacgtgatgcaatgactccaattaatgatcaaaattcaaacttctcaaatattgcgggttcctcaactttgactacaaatgactccgagaatgccattatcaataataatgataataacagtagttcgtcaaatgatgaaaatgataaacaatctaatcgtacttcaaatgatttacataatagaaataccccagttatcaagtcaacttcaactttatcattgaatatgccatctcctcctttatccccttatactagaaatgattataatgataatgataatattccaacacttttattcccaagagcttcaaaacctttaactagtgatttaagatatttagagaatgtttcagcttataaatatccatctcatgctgttactccaaaatcttatacttcaaatatttcaacttcaacatcatcaaataaagataagaataccaattcaaaacctttaaaaagtccatctgatattaaggtagcattcaatgatgaaaaaactgacactatcaaagagactaaaactgaaaataatgtctccgatgataactacattttaagtgaagattcaattttacatattaatccctataaacaaatgaataagcatggattcaaaaaattacagatcaattttctttcagaatatcaatttaaatcattcaatacctcatactcatattacaataataactccaataatacctctagtacctcatctaaatcaaataaatcatatgatacaactaaatctaacaccaactctaactataattctgattctgaattagagaaaagaagaacaagacgtttagtacgtcaaaataaatttgaattagagacaattgattcaaatgaatcaataatttcaagaccttcaactccaacaattaagaaaagaccaacatccaatttatcatcaccttcaactccaaaaagacaacgtactgcaaccccgattatctataactatgattataaaaaaattgaagatttttgtcctgaactatcaactttaccaaataataataaatgtcttaaaactgattggaaaggtcaatcaatggatttatcaactgattcattaattaatgaattacatccagctgaagttatgttagcttcaattttaagattaccttgtgcagtttatttagattccaagaggagaattttccaagaaaaagttaaaagaatgagagctcatttaccttttagaagaactgatgctcaaaaatcttgtaaaattgatgttaataaagcaagtcgtctttttgcttcttttgaaaaagttggttggttcgatgaaaaacatttccaaaaatatatgaaataatttcatcaaaattataatcattctcaacaaatttaatatcctccaatatacactcttccatgcttttaattcaaatttattctaataattactaatacacatacacttcactcctttcattattgatttacagcttttttttccttcctttcaaatttatactactgctcaactggtttgcttttcacttttttctatcatacattcaatacaacaatatatcccatcaatgatctggctttcatttatacatttacaatacctttaacttataatcattcactaatcttttttttttgcttctgctggtttcttatttttttgggaatatattatcaagatatactatttactttactttttttcattactgtttttgctttttcctggttttttataaaaatttaattattcaatattaatttacaattataacatttacttatcgtctagtaaaaaaaaacagaataagcttaattttgctttagctaaataaaagttaaaaatattcaaaaaaataattagcctgtgccgctcccaggaatcgaacctgggtctcatcggccacaacgatgcgtacttaccactatactagaacggcttttattgaaaatcaaattttatggtactttaaatagtgtatacgtaaaaaacaaatccgccgatatctcatgatctagtgggtctatagagataagatttagatataaggctaaatacatttctttctttcttttgaaattaaaaattggttaaaaggtaggtttttagttttttgtaaaaaaatttattagttcataaaattcattgtttttaaaatgactttgtaaatatttgaaacaactttcttttcttaatgaaataacaacattttaaaaataaataagcttaaaaattacctaaaatacagtgtattattttttagttatgcggaaagtttagcataaataatacctgatcaaataagggagactaatttttagatacacaactactagtatatggattattatctacgtcagtcgctttactgatataagactgtgaagaagtgtgatatttttaaacagaatatcacttcaacactgtaaaaatctttcttagtaaattaatacagtgaggaattaaaaattgagaaatttgtagatagtgagaagttgatgtcaaaaattatttattgtaatagatcaccgactgcatttgatgcttctttgatcaaacaaatagaatgtcattaacagagactgagagaccatcaaacatagctaccgactcaggatttaaaggtaagttagtatatgataagacattaagcgattgaatcaatatactaacatgttttcttgaattaatatagcaaatgatataaaggaaggatatcaaatgaatgaaaagattcttaatgaagaatataagatttggaagaaaacttcaccacttctttatgatttattatatacttattcatgtgacttcaccaccattatcaatccaatggcttaatgattttaaaacttcaataaatgataataacgaacaatatattgaagcaaatcttttaatgggtacacattcaatcaaatcacaaaattttttgaaattagtttcaatatgcgttccaagaacattatctaatgattataaacaatcagagttacaatctaatataccaaatagtttactaaaatcacgacaattacgtgttgttagagaatggaatcatccaggtgaagttaataaattgaagattaataaatttaataattttgctgcatctcatacaaatagtggtgatatattattatttgatattaatgatgaaacatgcaaaactcataaatcaactttgaaattccattcaaaggaaggttttggattagaatggaatccacatttaaataagaaaaatttacttttatcaagttcagaagattgtaaaattgcactttgggatattaattttgaaaaactctctaatgaattaaaaccttcaagaattatttcaagtcatgaaaatattgttaatgatatatcatggaataaatcaatggaaactgttttcgcatctgtatctgatgattcatcatatcaaattcatgatttaagattatcaacaggtccaattgtacatataacaaatgcacatcatgatcctgattctgataatcaatttaatttcccaattaatacagttgatttcaatactgatattccatcattatttgcaactggtggatctgacaattcaattcaaatatgggatttaagaaatccatcaattccattacgtagattgtcaggtcatcaagcagccagttattggccttaaatttcatgaaaattatttattatcatcatcaattgataatagagttttaatctgggatttaaatagattagaagagggtgaaccagataaaagaaaatcagattatcttgatccttgtttatcttatatgcatggtggtcatacaggtaaaattaatgactgcagattggcatccagttttagagaacttgatggcaacttgtgcagaggatggattattagaaatttggagacctgcacatcttggtgatgactatattgaagaaggagcaagaggaggaggaggcggaaaagaatgaagagactaaagatggtgaaactaaaactgatgatgttgaaatgaaagattagtttgtgaattatttatttgtaataattattttaaatcattattatattatcttgtattttgttttctattgtaatttattattaatttgttcctttaccgctatctattaatatattatcgttattactatacaaagctattttacacattagttggtttaaatctaaacttcatcgcaataccgtttccagtttttaatttgaatgaatttatttaattcatcattctctgattttttctcgtcaatagttgttaattgttcgttaattttattatcaagttcatatttcataactattgtaccatccattatgtgaaatacattttcttttttcagagaaacataggtgatgcaatgggaaattaatatctgtatccacatccattttctcaccatcattttcattatcatcatcattttcagatattttctttctatagaaatcaatcaatgattgtttcgtttcacgtattgagacatcaatgtttatgaatgtattgtattctggtgtagatatgaactcttgccaagatttttcatcaagtaaaaggtttttatcaaatccacaaatatcaactttaaatcttttggatttttgtttactcttagatttagcctttgtctttttcttctgggtagtttcttcattatcacctggcttaatttcttcagcgttaggatcaaatgcttgtgttaatatttcattgatttgtgcaattacttccttcaatttgattaaatattgtagttttgatttgaaagatttcagttttactattgagtaattgtaaatccgatttaaattgatcaagtttctctctttgtttatcatcaataatcaattcacccttatcgaaaacaggtagttcattacctatactttctaattctgcctttgttgacactacttgaaataaattatgaagttgatttttctctattatttgagttgaatttaaatgataatttgagttggaatttgtatctatatttgaagggaattttgcaatataagatttccaatattcaattccatgatcttttgaacaaaattgtgaattattttccgaatcaactggcttataacaatcaattaatttacattttcttttccataacgatttccccttatgaaataaatcatcacaaaatttgcaataataacttttaactaaatctttatttttttgatttaatcccatacatttaaaatgaaaccattcatcacaaccgtcacatgcaaccattaatttacctgtatcaggtttcctacaaatacaaaagatttcttcactatctaaagaatatttaggagagtttttaaaaacatcatattgtttctgaagttgagcatgtgatacttcagacattatccattaatctgtattaaattagtagaaaatgcactagattaatatggtttcagcattcttggaaaattcatgttaccttgataactcagattaatttttaaaaaatacaaatgcggcggtggtggcgcatgatatattatgataaaaagttacgtaatacagtaatacaacaacaatctgatcattacataatcatcacgtgatgccatgaaaaatattatattgaaaatactacctccctggttatcaatattagcgataataaaataaaataaataaaataaaataaaataaaatgacatgaaaaaaaaaattattttattttaaccatgctggtatcatgtattatcataatatgccctgctgttgaccgtagtggttatggcctttaattatatcttccattttccaacctttcaagtatttaaccctcccagtcgttggtttaaccttatgttctatcattcattcattcttttactattattgtccaaaaagataaccttatttaactttatttgtgtgtgtgtgtgtgtggcataaatattttacaatagcttatctatatactaggaaatagaataaaataaataaaaaaatattttttattattatcaatatgtcaatactatcaggtttccaatctccaggtcattttgttgaactattcattagagatgttgaagatgtatgttcagctgataacgattataatggtgaacatttcggtgctcgtatatcatcaattttcgttgttttatttgcttcagcttttggtgctttcttcccagttttatcatcaaaatattcatttattagaatgcctccaatatgtttctttgttgctaaattctttggttccggagttatcattgcaactgctttcattcatgtattaagtcctgcaagtgataatttatcaaatgattgtttaggttacccttttgatgtttacccattcgcttttggtatttgtttaattgtccttatgttaatgttcttcctggaattaattgcttatagatggatggaagctaaaatattaaatcaaagtttagatataaatgttcctcatagtcattctcatttcggtgataccgctttatacgttaatgatgaagaacatcatcaaggtcacggccatactcatgctgatgatgttgaacatgatcatgatattaaaattaatgaagtcgtacatgttggattaggtgaagatcatattcatcatcaacattctcataatgatcatcatcataatgataatgttcaattagatgatacagaagatgaccatcatgatgattatagtgaggaggaaattattgaaaaacaatccttacacaaagataattcattagatttagaaaatcaagaaaaagaagacttatcacttgctgaatatagtgctcaagttttgaacgttttcatcttagaatttggtattattttccattcagttttcgttggtttaacacttgcttgttcaggtgatgaatttgtttcattatatattgttatttgctttcatcaaatgtttgaaggtttaggtttaggtacaagagttgcatgtgttgattggccaagatctaaacgttggactccttggttattatgtttaggttattcaattagtacaccgattgcaattgcaattggtattggtgttagagattcttatcctccaggtagtagacgtgcattaattactaactggtgtttttcgattcaatttctgctggtattttaatttatacaggttgtgttgaattaatggctcatgaattcttatttagtgatgaatttaaagggacctggtggttttaaaaaaatgatatgggcttatttagttcatgtgctgttggtgccggtttaatggcattattaggaagatgggcttagtttccttcaatttcctattctttatttatagacttacttttataaaatttgtacattatataccctggtttttaaactaatctcgatttaatctaatttaatttgattttcatagaaaaaattataaagtaaaactacacaaaattatacttcttcctcgtcatcagaatatcttttggatttatctagtgctgcaattcttcttgctctttcaatttcagtttcaccatgaatcaaattattattatcagaatctcttaaaacgacattacccctatcatctaaggtgtaatcatcatcactatcatcccattatcattctcattctcatcatcgtcatcatattcactatcatcactgtcaaaactttcatgatcatctatctatagttatagaaggatgttgtgatcttgattttgaagtagatttagattgtgactttgaacttgattttgttctctccttcaccttagatttggtattattaaacttactactaattcttctttttaatgtcattctccttggagctataggtagttcaacaattgccttcttaggatctgcattaataaaatgtttaattttatcttcaatacctaattcaacaacttcattattttcaggaattaaatcatcattaccatattcatttaattcttcatcaattgtttcacgttcctttttcagtccaaaatatcttaatgttttattaattaaattagcattatattgttcatcactaattccttttgataattcttctgccttttgtttcttaatattgaccttatatctacctaaaatttcaccatccttcattctctataataatatcatcattaactctataaccatgtaatttccttgttcttctaggaacatcattcttaaatagcatcatatcacttaaatcaataaatttatcatatgtactcttattagtgtttttcctactacgtgtggtagttgtattattagtttgaccttcatcattttctttcttctctaaaatttcagatatattatgttcactttcttcttcaccatcatcttctttctctttattaggataatattgcattaggtataccaccaattgttgataaaatcttttgactaacagtattccctcttgatctagttgatactttagattcattagaatctttacttttttgagatgctaaagtacttgcacgacttctaactgtatgtaatacttcaccatgttgatcttcaataactaaactatcatcataattaattgcttgtgttggtatacgtaattcaccatcttcatcataccttggttgtaaatcttcatcacataaatcaaaatttgttttaattttttcaagtactttagccttagcgtgaactttaagtctaacatcattagaagtaagtgaattttcagaatgacgtgatgcattagagactattctttgtaatggaacaactaatttaccatctctatcaagatcaataccttcaacatgttcatcaactttattaatatcatcatcatgaagatgttcattagtatcatcatgatctttttcattaatatttgcactattatttgttggatgtctattaatttcctttaaatctaatgtttgagcagttggaggagttttacgtttctttgattgtttacgtttcagtaatttcttcttcttctttctatttgctccaccacttggtctaacacgtataccactcgtttcaattgttggttgattgcttaatgaatgtaatctatccataccaatatttgcattaagtcttgcattaattttttcatcaggtaaattatcttcatccatactggtatttgatgataatgtcatatctgcataatcatgatttgccattgtatcaattcttttcaatgagaaagaagtaccagatctttcaattttaggtaatctattaaaccaattaccattaccattgccactaccattaatatcatcagtttcaccctttgtccaagtcattgtaaatgtcatactttgtaattgtttacctaatgttaaaactgcaactgatgaaccatgaactataatacttgtaataattaaaaagcaaacagttggccaaataattctaattaattgataatattcactttcaactggataattagttgaaggaccatgagtaatatttaaaacatcagcttcaagatcagaaatcgcaataattgctgcgaaaaactgcaccaacaccaattggaccaaaatgtccaacgaaaattgcttctttccaatttttcaagtctggattaattgcctttgttaataaaactgcaggaattcttcttaatgttaaaacaaccaatgcaagacaaattaaacgccaacaattaagacctaaaacagtatcattaaattcttgccatggaataattgaaccaaaatacacaaaatatgccatatttaataaaatatcaataacagttgaaacatttgattcttcagttctatgagtaaaccaaccatcccaagcaaatgcagtacctgcacagaatgatgctaataaatcatcaatacctaagattgaaccaaaacctgcacataacagcgctaacattatgtaaaatgcaaggaaagattcatgatcaattaaatcatgatcctctgcatatcttaaagcttttctaccaacataaccaattgtactacctaatacacaaccgaaaacacattcatataacacagtaacacatatccaatctttagcaatttccgatgcatgtccactatgtaggataagattcaaagcaaggtaaacaaatggaacagagacaccatcattacatgcagattctgcacttaataaatttcttaaatgagctggaactctcttagcaaatttacccttaccgacgacagcttgagctaagataggatcagttgctgtaacacaggctgaaattaataaaccatgactaaatgttaaaccaggaatgattgcataaataaaagccccaataatcaaccaaccagctgtcatacacggtattaataaaaggaataatgaaaaccaatgttttaaaacatattttttaggtaattcaactgaaactgcaacaatttcaatacatagaagaactcttgaaagttccaatgtaatataaaaatagttcccccaacttaaaggattaaaccaatttaaacaatgaggaccaacaattaaaccataaattgttgcaactgaagcttcacccagataaagtttttccttaacgaaaagtgaacataatgagaaacaagcactaaaaacggctataactgcatatgcaacatgtgctttagtaacatctatttgagaccaaaccatcaattatatagtaaataaaataaaacgcaaatgaaaacaattagtaaatgaatgtatcgaaatagaataatatagaatttgtaataataataatataatataataaaataaactttagatgtattacagtattaaaggatttaacaaacgcagataccagaaaccggctagcaaagcgactacagaaggaaggaatacaaagaagtagaagagttgaaataagaaagaaaagtacagttaagaaatccagcaacaatgcaaagggtcctgtccttcaagataataatagaaagtgagaattttgccgtatttaaatattttcatgttctgatcttctttttattttggtatctaggggttgtatcttagagtatatactgatgatgatgataaaatggggatagatacagtttgataacactcaattgatactctaataaagtctttaatcatcaactacaatctctgatcatctcgtgtactgagctcttatcattagtgaaatgataatactgcgccgcacaatattttgaaatatttagacgcatcgacgcacacaattttcaattataacttttaacatgaaaactcgttagttgaatgaattgaatcaaagtaaagtaaagtgttaaattattaataactttttttaaactaaacagtagactaagtcattaaatggctaaacaaaagaagtcttcaactccagatcctcaaatagaggattcaaagagaaattctaaaaattctaaaaactctaaaaattcaaaagatcaacaatctaatccacctgtaaagaatggtagagcagtagttgcacagacagcatcttggacaggtaaattaccttgttctctattacatgaacattctcaaaagcaaaaatggaataaaattgaatatgatatgattaaagttaaagatggttttattgcatttgcaaatttatcttggaaaaatcctaaaactaatgaattaattaatgttaaatttgatacaccaaaatcaattattcaacctcaggaaactccattagaggcacgtcattatgctgcaacttatgcattacatagaatcgcatcaaataaaaatattcatatggttttaccaactaatcataaacatatttggagtgatttagaagttgaaaggaaaaaaatggttaaggaaaatccttcaaaggctaaacatcattatgcaaatgatccattcatggctgttttagaacatcgtaaaaatatggaggataaaatgaagaaggaagaagcattaaaggcagcttcagctaaagttaaacctaaacaaattattattggtaatccaatgaaaacttcaactcctaaaaatacttcatcaaaaccatcagtcaaaccgcaaactgtaaatgttgcaaactctgcaagctcttcaatggttcctaatgtttcaaatacctcaaaagtttcaaatactacaaatactcagactacttcacaaattgaaaacgcttcaaatattgctccaactgaatcgcaaaaacaatctagcgtccaaaaagccctggatctttaccacaaactactttccaggaattcaatttatactatacaagatacaaataaaaccgccatttcatttcctaaatatgaaaccgaagctgcagctgaattttatctcagttcagaaatggagaaagctattgcagaagttattaagaatcaatactcctggactgaactctcttccaagaaaatttctacgatggaaaatcatattaaaaaaataagatatcaattggatgcaataggattcaaaccttgtcatatagaggaagctttaaaatataaaattaattttgatgatatacttcaatggttattaatatatttacctaatgatgcaatacctgattattttttaccaaaaaatgtgaagacaactttgaaagttacacaaaatttgaaaagggaacaaatgattactcaattatctcaaattggtctccctacaaatataattggtaaaacattagatgataataatttaaatgttgtacaaaccgcagtcaaattgactcaatcttttgcaaataatgatgtcaaaatactagaagttccaagtgatattgattcattaaatgaatggttagaagaaaaagaatctcttaaaattatatttgaatctaaaattgttgatcaatcaccacctaatgatgatattattgaattccatcttgcaattgaaaatctagaaccaaaacttttgtcattagttgcttatagatctgaaagttatccttatgatttatgtggattaattttaagagttaacaattcatcatttgttttgccaaattatattaaacaatcaataatgactcaacttatccaatatttaattgatattggagcttttggaatgcactatttattttcttgtgttgattggttagaacaaaatataatgcaaattattgaaaaccctggtcgtatatatgatcctaagaaacaaatttcaaatgatgtcaataataaagataaaggaaagtaaagaaaaattaaagaataagaaatttggctcatctaatagagcacttgatgttgattcaataaaggctaattatgagaagaaactggattcaccagaattgaaggaatctattaaaaatagaagtaaattaccagcttggaaaaagatggaagagattgtgaaaacaattaatgataatcatgcttgtttgattactggtgaaacaggttctggtaaatctactcaaattgttcaatttatcttggatgatttgaataaaaaaggcgatttcaaaacaaaaattgtttgtactcaaccaagaagaatttcaactattggtttagccgatcgtatttctaaagaaagagtcgataaatgtgggtctgaaacagggtacattattcgtggtgaaaacaaaactagcagtttaacaagaatttcatttgtgacaacaggtgtggttcttagaatgattcaatctgttttcagtgactctaaggatgattcattttttgaaaatttaggatatatttttattgatgaagttcatgaaagatcaattgatagtgatttcttattgattattttaaagagaatgtcatctaaatttcctaatttgaaaattattttaatgtctgcaacaattgataaaactatatttgatggattttttgatgaaaataaatctgtagaaaaaactaaaattgcacatgtccatattgaaggtagaactttcccaattaaagattattatcttgatgatgttttacatatgacaaaatttcaaattcctgattacagaatatctggtaatgctaaattttcagataggattgagattgaagacaatgatgatgatgatttcttagatattgatgaaaatgatgagattgaagaagatgttaaaatgattacaccaacagcaacatcacactttttccgttcaggtagtattaattatacattaatcaaagaattagttttaaaaattgatgagatgttaactgctgataatgataatggttctattttgatattcttacctggtgctatggaaattaccaaatgtttgaaagaattagaaaaaattgaatctttttggacattaccattacattctaccttgacaccaaatgaacagaaaagaattttccaaaatccaccatcaggtaaacgtaaagttattgcatccacgaatgtcgcagaaacttctattactatcccagatgctgttgctgttattgattcaggtagagttaaacgggttgaatatgatagttcaactaaagtttccaagatggaagaagtttgggcttcacaagctgaagtcaagcaacgtagaggtcgtgctggtcgtattagagaaggtttatgctataaattatttacaagggaaactgaagaaagaatgattcctcagccaattccagaaattttacgtacgagtttggaatcagtttatttaacagttaaagcaattggagttgatgatgttggttctttcttaaaagatggtttagatcctccatcatcttatgatattgaagatgctctaagaaaattaatacaaattggagcaattcatgatcttgactttttaaccccattgggtaaacatttatcaatgattccaacagatttgaattccggtaagttattaatttttggatgtatttttggttgtttggagaatgcattgatattggcagctatagctattactggatctcctttcagctgtaaacatgaagatagagataagatgaaaaatgttcaacaaaaatttgcaaaaaacaatggtgatatgattgctattttaaatgcttataatgaatacagctcaattaattcatttaaagaccgtaagaaattctgtaccaagaattttatttcaatgattagaatgaatgatataacatctactaaaattcaatatttaaattcattaaaagaacttggttttattccatttgattatagtactaatgaaatatcaaagaagaaattaaacagaaataataataatgttaatgtcaataaggctattttaaccacatcattatatccaaatgttgttaaagttgaaacacctccaaagaaatatatccaagcagcagaaggtacgattgcactcgatttttcatcaaaggatataaaatattggatcaaaaatgttgctgagtatagaaacttgaacgaatattctccatcaaataaaatgagaagtccacgtaaaacaagagttttctttcatccatcatctacacaatttcaaccaaatgctaaatttagtagttatccaccatatatgatttacagagaatctcgtgaaacaaataaattatatcttttagatataacaccctactaatacatcatcaatgttgttgtttggtggtagattgttatactctgcaaaaaatttatctactattgtaattgatgattggttattagtcaatggtattccaaaacaaatagtattgatgaaatatttacgtggtgtacttgacaagattataaataatcgtttagatgatccaacatcagatgactatgaagatattttaactttgattgaaaaacttcttgcaatgccaaattagttttatataaatttatagaaaagcctgtattttatattataaattatactattcatttaatctccaacccccatgagattcaattaaaacattttcctttgcccaaaattctaaacttgatttcaccataaccaacggcattttcaagttcatcattataatacccattttaatatcctttatgctagaatcattaatgaaattcaatacaagtaatttttccaacgtcactctaaaaggtttattcacaccaccaatttcaatgttaatatcaactaaagttttttcaggatgtaatgtgagtactctatctttttgaaattgctcataacctttttcatatttctccaaatcatcctttataactttgggataaacaaacgtagatgccttaggtgataaatttggccaaaaaatataacttaaaaacactccatgtatatcattaacagtattcaccacatcatgtatttctgtatctaacagttcactcttttgaatatcatttatcataatatcaagaatgttaaaatcgtcatcaacaaatttagtcttaagaagagataaactattgaggatatgtgatatatcataatttttaacagttaataaatctactgagaatattttaacaaattgatcaataaataatgaattatcatcaaatattgaagtaagtgaatcaataatatcatcaattttaccaatttgaaaatcaggtaatgcatcaacaggatctggttgccatttaagcgttcttttcttataatttctagattttgaatttgaatttttagaatatcctctaacaagttcactatttaattcaattaatttgttttttttacgatctgttgtcaataaaccattcactattttttcaatggtatcatctcttgttcttaaatagtttcgtattggtcttgcaactttatctaataagacacctctatgatcaatcagtagaaatgaatgaattgtcttgatataataaattataaggtcaacagttttaacacttggtaacaatagtttttgatttaattgctgaataaaactttgaacaagtttatcatgatatgtacttttgtcaagacatctattaatttctttcatggtttctcttgtgaacggatatttagatataagatggtataaatctttaattcttcttttgattaataagtttttagcaatcagaaacaaaccttctctaaaagctattacatttttcatcgaaacataagaatcaaaaaccataaaaacatctagttcaacccatttaaccaaagtaccataaataggatcatcccaatatattgtatccagatgtttagtaattttcgttttggatacttgaaacataagttcatccagttccgagtataaattaactttcattaatactttagaaacaaaatgtaaatccccatgattttcttcaattataaaaaaattaagtatatctttccatatctttttcgtgtaaccttgataaatacagaattctgatcttttaagtaatattatgtcaagatcattaaatttgaaaatgatatataatgtatccatatgagacgatgatgcttcaatccatttgaaaaaccccagaatatctgatttaaaactcaaatgaatatctttatattttgaatacagtaaacgttgaaatactggtaagtaaatgtgtccctgtttaatctttcgtatcaatgcggtgatttcattggggaattcttgtttttcaggaacattcagtgttagtacttgttctgacagccagtttatcagcatagccgtatcactgttatcataaccgtccataattcttcttaccagttgatataattccagaccaaaagaaagtttaacatgatagacaacatcaaaattgaaaatgtcaacatgaaatatgaaattatttttatttcctaaacgggtaacccgcgatctcccccatttgaaattattcatgtaacggctcctcaatagtttcttaaaacctttgctcagcttcctttgtggaagtttagggatattaaggtataggtatagatactaaaatgagtgccattgataattttgtccaagttacaggatgcaatgattatcaattagcagaacaattgctgaggaaacatagattacatttaaacgatgcaattgatgattattacacaaatcatctctctcaggggtcacataataatgccaacttgaatgtggaagctcttgaagcaatattttctcaatatgcagataactcggataataatatcatggatttagatggaactatagcatatttcacagatctaggaattgatgtagaaaatgatccacaggcattagttgcagcatacatacttgagtcaccatcaactggtgtctttaatagagataagtttataaaaaactgggggaaagtacaaccatcaataaagagtataagtgatatgtcagaatatcttaattctgcactaaatgatattatattaatgaaaaatgtatataaatttgcatttaaatatgcattagaagagggtcaaaggaaattggcaacggatgatgttgtagcattatggaaatgcttttatcagaatgagtttaagaacctagagatcaatggagtggaatcaactgtaactaaatttgttaatgattatattggaggtggtaattgtcgaaaaacgcaaatcagccaagatgaatggaatatggcctaccaattcttccaaatcccattaaatgaactctcccaatacgaagaatcctctgcatggcctgtgctgatggatgagtttgtagacttcctcttagagagggagtaagtattaaaagataagattacgtaattacacgaaaaaaaataatttttttttaattaaatttattttatgacattgaaaaatttttaagtttttacaattgttacaggaagaacaggtatatataggatcaataggacattaactaactaaacaatggttaaatcatatccaagatacatacaagattccgttattggtgtgatttcatccaaatctaatttgatttataatgaagattctaagacaattttttcatcagctttagattcagttattgaatggaattataaaactcaaactcaaatttcaagaattactgatactgtaactcctggttcattgaattcatcatctttattaccacctgctgaagttacaagactagcttactctaaatttgccaatttattagcaattggattctctaatggtgatattaaaatttgggatttatcaacaaatagtgttatcataaaatttcaaggtcataaatcttcaatttcatgtcttgagtttgatccaaatggtacttcattaattagtggttctaatgatacatcaataattatttgggatttaatctctgaagttggtttaattaaattaaaaggtcataaaaatacaattacttccattcattattataatgaagattatttaatttcaacatctaaggatggtttagttaaaatttgggatttaaaattaaatcaatgtattgaaactcatttagctcataatggtgatacttggtcgatgaaagttttcaaatataatgaaaaagattatgttttaacaacaggtatagatggtgaatgtaaaatttggaacttaaatattgatttagatgatggttctaaattaaaggaatttggtattttccaaaagcaaagtaaaaatagagttgtcgatattaaatttgattcaattaatcaattattaattttagcaaatgctgataaaactgttgaaattttcagattaagatcaattcaagaaattcaaaaggcaacaactaaaagaattaaaagattaacagaaaaaggtatgatgtgaagaagaaattaatgaatctttagaaaattctaaaatacaaatgttgatttgtccatttacaataatttatacagaatctaagattaataatatttgtatgataagttcaagttctaaagatatcaatttaattattaacaattctaataatacattaaattattggaagataaaattacctgaaaatataaaaaagcataataatattaatgataaaattgctacatttaaaatattcaattgagagaccaggacatagaaatgatattagatcaattgatataaatgatgatgatacattattatatacaggatcgaacaatcaaattaagatttggaatttgaaaacacttaattgtattagatcaattgataaaattggtaatgttttatgcggtaaatttttaccaggtggttcattattggttattggtttgaagaatggtgatttaaaattaattgatttatcaacaagtgaagttattcatcatattgaaaatgcacatgaagattcaatttggtcaattgaaattacatctgatggtaaaactattttaactggttcatctgataaaaatattaaatattgggaaattaaagttaatacattagaaaataaattaaatttaaataatattaaaacattagaattaaatgaaagtattatttcaatgaaagtttcatcagatagtaaatttttatcagtttcattaatggataatacagttaaaattttctttttcgatacattaaaattttatttaagtttatatggacataaattaccagttttatcaattgatatttcatttgattctaaaatgattattacatgttcagctgataaaaatgttagaatttggggtttagattttggtgattgtcataaatcaatttttgcacatgatgattcaattatgaatattaaatttttcccagaatctcataatttccttacatgttcaaaggataaatttattaaatattgggatggagataaatttgaacaagttcaaaaatttgcagctaatttaggtgaagtttgggggatttcaattagttctgatggagaattttttgtaagtgtttcacatgatttcagtattagattatggaaacaagataatgatgaagttttcattcaagaggaacgtgaaaaggaaatggatgaattatatgaaaatgaattattaacatcattagaaggtgatgatataacaccaagaaggaaaattgaggatggagaggaaggtgaagatgaagatttagatgatgcagaggcagttagagcaaagacaatggaaaatttaaaagctagtgaaaaacttattgaagcattagatatgattgaagatgaggataatgcattattaaaggcaatgaataaaacaccaagtgaatatttatttgagacattaagtaaaattcaaaccaaatcaattagaggatagtttattagtattaccatttagttatacaattaaattattgaaaagtataaataaatggactagaaaggatgatttattacaaaagcaatcagcaagattaaatttaatttgtcgtacattatttttcattgttcgtgcaaatcatatggaattaataagtcaaaatgatgaaattttcaagaatgaaataataagtttgaaagaacaattaagaagtatgatcaaggaaactactaaaaatattggatttaatgttcaaggacttaaatttttacaaaataaatggtcacaagatcatacacatatctactgactgaggagagctgagtctacagctgttaaccctgatgataaagtaagaaagagagtgtacactactcttgcataagtttgtaatactttgtaatactttgtaatacttaatagaaaatagaataagaaaatgaactccgttaacgccgacttccataataaattttttttttcaatcacccgcttaacaccgaagtcatcaacatgaatttagggacttttctctttttctttaaggaactaatctcattagataccacaggtaagtatgtctgatacaagaatgaagaaacagagaaatagagcatcattggtttgtatgcaatgtaagattaagaaaattaaatgtgatcgtggtaaaccatgtaataattgtattaaatcaggcaatcattcagtttgtgtttatgattatataattgaaaaattggatgatcaaacaaagagaatttcacaaattatgacaacaattaaatctccatccccaagatcaaatttaattaaggagaataataaaaatggtgatatgaataataataataaagtgataatattaatagtgatgatgataataataataataataataataataataataataatattagggaatcatgtagataatgaagaattcaaattcaattatggattataaatttaatatgatacaaaaatatattgttttcagaaaaccatcaagaacatcaattaaggccacattttattgtcaacttatttacaacaaagaaattcatttgcaagacatacattaatgtgttttaaacaagaattaaatagggagaggaaattatggaaaactgaagaattttaaattaaatatgaatttattagatttacattataattcaacaactaataatgatgaattaactaaattaattgaataaattagttacaaataattattatgcaatccttgaaaggttaacatttttccaaaatgaattaaataaagttttatttaattcttatattcccaatgggagtaattcaattaattttccatcattattttacaattcaaccaaatggtgttatatttaatggagtttctaaaaattttgaatattcatttattgcagttataacatcaattattgaacttgttgatatttttcactaaaattgatactgaaaaatataaatttaatttcccattaaaatgtgaaaataatgaatttaatcaattaacattattattaatgaatagtgcaaattatagaaggaaagcatcaattttttcaatttatacattacttaatttaagattatcattaatggtttatggagatttccaaagtggtggtatagcaggacaaaattcttatccattatttcaaacagctgtttcaattgcttcatgatttaggtcttgatttagatcaaaatttaattacttatatggaaaaaccggatattggtgataataataataaaatggatgaaattttatttgctaaagaggataccattagaatcaactaaattattatggaattatattttaatgttagattcatcatatacaattaatttaactgttacatccaataattgatgaaagatttacacatggaatttattttactgataatcatagtactaatcagtattttagataattcaaatgatttattaaatagttatgttacaattataagggaaatatcattattaacaatgacaaatgaaaaaattacattaaaaaattttttaaatcaatggataatttaaagaatttaatttcaagatttgataaatttaataatattaaagaaattgaaaaaaatgaagataaatggatttttttaaagattaaatttgaattattaaaatgttatatgtcaatgataatttatattagagcatatatatcagaggaaagtaattaatgaaattttcccaaataatttaattaataatactaaaaatattgaaattattaaaaagatacgagatgaatgtgatattaaatgttcattaatttattttttttcacttaatgcaattgttgagattagtaaattaagcaataaatttgttttatataatagagaaatttttgcaacatggtttggaacttgaatcaatgttatttatggatatagttgttaataatgatatgaagaataaacaaaatattgatccaaattgtgttaataataatgatattaatgagaatacatcatctaaattacctgatattgataaatttgatattaataaattagagaaatcattatatgaaaataagattaataaagaaagtgaaattattaaatatgtacaggaattaagtaaacctgataaattagcaacatttttaacaaaatcatatgaaagtgtaattaaatcaagtatactagtttcaaattatacatttttcgttatggcaaaattaattttaattttaatttattgcctttattgttatattcatttaaagattaattcaaatttagaaattttagaaacttttaataaattaaaggaattaacaaagaaaattgtaattattcatgaaaatcctggtagtttaactgataaaatctcacctgatgtaattgtgaatgaaattaataatgcacaaaataatgttattaacaatattaatgagaatcctaataataaagatgaaattacatcaataatttcatcaaataatgaaattattgaaccaattgaatttttcgatgatgataatttattatcaatatttaatgaaattaatgaatttatttcacaacctgagtatagtatttaattaatgctaaataaatattaatattatttcattatatcgttatatatattatgtatttttataaacaagttaatttaatttatagacaagtaatgtaaattattaaaacatacctggcataccacccataccaccagcaggaggtgcagcagcaggaggaccttttggttcaggagcatcaacaattgcacattcagttgttgctaataatgaagcaacacctgaagcatcaactaaaccatttttaacaactttaaaaggatcaataataccagcttgaatcatatcaacatattcaccctttgcagaatcataaccaatattaaattcatcagaataagaatctaaaattttaccaacaacaactgaaccttcaccaccagcattttcaacaattttctttgcaggttttaaaattgctgctttaattgtatcaacacctaatttttgatcaaaattatcagttttaacattatctaaaacttgagaagctttaattaaagcagtaccaccacctggtaaaataccttcttgaacagcagctctagttgcacataaagcatcatcatatctatctttcttttcaccaacttcaacttcagatgaaccaccaactctaataactgcaacaccaccagataatttagctaatctttctaataatttttccttttcataatcagaagttgaaacatcatcaattgtacctctaatttgttcacatctttgtaaaataacatcttttgaacccataccattaagaacaacggtatcttctttagtaactgtaattgaacctgcattacctaataattcaggagttgcattttctaatttaatatctaattcatcagtgaaaacagtaccaccagttaagattgcgacatcacctaagatattttttctattatcaccaaaaccaggagctttaacacaacaaacttgaacttgacctcttaatttatttaagatacaagcagctaatgcctcaccatcaatatcttcagcaatgattaataaaggttttcttaatttgtttgaaatttccaatgaaggtaaaatatcttgaattgttgaaattttcttttcacttaataaaatgagaggattttcaaattctactttaccagatttagcatcagttataaaataaggagagatataacctctatcaaatctcataccttcagttacctctaattcatcctctaaagttttaccctccttgatggtaataacaccttctttaccaactttttccattgcatttgcaagcatattaccgatatgtttatcaccattagcagagatcgtcgcgacttgggcgatttcctctgaagttgtaacttctcttttattcttggagaggaaatcaataactgcatcaacggcagcttgagaacctcttctaagatccattggattacaacctgcagcaacatttttaacactttcagcaaagattgatctacctaaaacggttgcactagtggtaccatcacctgcagattcattagttttggatgcaacatcttgaattaattttgcacctaaattttggaatttatcctccaaaatgattgatcttgcaacagtgacaccatccttggtaattttaggagcaccgaaagattgttcaataataacatttctaccctttggacctaaagtgactgagactgcatcagctaaagtttcaacacctttaagtaaagccgctctaccttctacaccgaacttaagttctttatgagagatggaacgagagaatgatttgagaggggaagtagtattcttagcaatagatctgaatgaaagcatttgccaaaggaagggtgcagtggataaacgatataaaagtggaaatacccagcttatataataaacagcagcgaaagaaagagaaacttctagaaaagagggaattactatgacagtaattggtgttgtagtagatgttgagaggtattgttagtgtctatgcttgttaacagttgcagtgttcttttactgtgggaagtactgctattggtattacactctctgtatcccagtagtatggcctctcttatctgtcgggtgtctcctagtactaccagtagttcgtacatcacattcatctcaaaccattcaaaggttatattagatacaccttcacaacatcttcgtacactttcacatatctgtattgtatcctgttgggtgattgtgtcctgattgaataatggtggtgatgataatgatatatctcccttgaatactgattcaattatacgtaaaattgtattgttattggtattgttattggtattgttattattattggtagtagtaattgtattattgctaatagtattaccactattaccaccagtaccattaccaatactatgacttgatgtattgattgattgaatatcaaaattattattattattaatagtgttgttaataatactattattattattattattattaaaactattactatgtctaacactcaaaacactatcttcactctctgatgtttcatcttcatgtctatacctattactattactatcttcattccttaaatgaaatactttcttcagcctttgttcaattttaactaatttttcacttttatccattgtctgcagaaagaagagagtatcattaaataactatttttctatacccccccttcttcctttaacaatgattaattatatcattatatcatcatctggtaaacccatttatgcttttgataataataatataattgtatattctgcaattattcaatcaattgtatcttatttcacttattcaacttcaccaaatcaattaattaattcaattaaaaataataattctttcattcagtttgctcattataatcctttcattttaatatcaatatcacccataaatcatcaccacaacccttcttcattatcaattctttataattaccttatttcattactttctaaaccttatattgataaaattttcaataaatatccaaatttcgattttactaaattattatcaaattctgatattttaacattaaattcaatttgtcatgatttatcattaaatattaatgccattttcaattataattcattacaaacattaccaataaattataaaattagatccaaaattaattcaaaatttaattcattatcaacatcaaatttattattcggtttaataacaacatcaaattttaaacttatttcaattttaaagaatattcaaaattctaatcataatttacacatcagtgatttatcaatactatttaaaataatttcaagttcaaataattttaaattaaattctcaatacatcacaaatgaaactttttggttacctatttgtttaccaaaatttaattcaaatggtcatttatatactttaatacaatttgttgaattaaatgattcaaggtatcaacaattacatagtataagcgcaaataacaatatacagataaactattaattatactaatgtcaccattcaaagattcatttaatgaattaaagaaaatttcaaataatttaattaaatcactcctatttaataagaaaatttttaattcaatttataatccattatcaattaatttaccaattccttcatcaattatttcttacacaattaaaaatacttcattacttcaatttatagaatcaccttcaaattcttcatcattcccattaaattttaaaaattctacaattattatagaaaattattcaaattataaattatttgcatgtaaattatcaaattatgaaatttatcttaaaattaattcatcaacaccctgaatctcaattattaccaatttctaaatcaattttaaattattgtattttaaataatcatcatttatttattcaataaattcctttactatatttaaatgctttaaataatgcaatataatgtgataatcctccaaatacaactaaaatatgaaatatttgatgtgaattaccaaatttatcaaattttccaatataatatttttcaggtattctaaatgcatataagaaagcacctaaaagataaaaaattccttcccaaataatatatttaattgataatttttccattgcaatattaattggatatattaacataattgtaattattggtaataatccaataaatgaaaataaaataaatattgaagtcctaatgacaatccattcacttgatttaaattttggattccatgttaaaattaatgctaaattacctaaaataataattccataaatgaaaatactcctcatcattggattgtcacttaatccataataaattatactaattaatgaaactgaaattaatattaaaatacctgcataatctaatttactacccattgatgcaacccccattgaatgaactttaattgtatggaaaattgatgaaaataataaacaaattgaaaatccaattataaataaattataaattataaaatcattacctttaatttcataattaattaacagcgggataattaaacttggtattaaatgtgtaaatatattaattgtttcattatgaaaataaaataatgatttataacattcataaattgattttgtttccattatatatcctgttaaaataaatttattatctctttgccatggggggatttcattataatgaaataactttctcttccatttagtctttgtagttattgtagattcaacattttcatttgttgtaataattgtagttcttttaatcattgtgtaaagaacagaatcatgatgtgtgatggtttaataaactccgaaattttcattttccatcaactaactgtacgtaatgtaataaattaaattttgttgagccatcttatcatatgatgaattaggccggacttaaagacatgttgggttttattattacttgtaatatactaataactactgattatgataaatttcaattgaatttgaattttaatttatacacaaaggtatattaattttaaataagacaaataaaacaataaagaaagaataataattataataaagataaagataaagataaattctaaaattagattaataaagcggctgcaattgcaagagcacctgcacctgcaattggtgacaaacctgctgcaccattatgagaacctgatggtaattcagaacctgatttagtagttacagaagctgaagttgattcagtctttgaagtggattcagtctttgaagttgaagtaattgtatttgaacctgattttgaacctgaaccacttgcagttgcagtttcttcagcaaattttgatgcaccattttctaaagttgattctaatgaaactaatgtagtagttgaagtaaaataattttccttaacttgagaactatattcatctgcccaaactgatgaaattgctggtaaaatacctttacctgcaatattagttgcactaatatttggtgctggtaatgcaattttttcatcaaataaataaccatgataagtttcattattaaccataaatttagtatcaacatctttattagttaaaccttctgcatcagctaatgatttccaaatatttgcagtaacatcatttctacctaaattatataaatcccaattaacttcagctgatgcaatttgtgaataatgatcatagaaagttgaatcagttgtaccctttaattcatcatcaattacaccacctaataaaattgagaaaacagtattttgttctgcataagtttcattttcatcaaatgtaattaaaacaagtgtattattcataaaatattcattttctaataatggagtaacaaaatctcttgtccatttacctgcaactttaatattagtatcatgagcatcatttgtcatatttggagtaataatcatatattgaggtaatttttcatcctttaaatctttttcaaattcagtaaagtttttcataactgataatctagttgcattacttgtataagattcatataaaatgaatggattatgttttctaacataatcatttgcaaaagtttcttgatttgaataattataaccagtaaaaccagtatatggtaaatgttcttgatatgaaccaaatgaaattcctttatcatctaataaatcagctaatgttgaaacgttttttggtaatgaagtaaatctatcatcatctaaggcaaaataatcaccaccaactgatgacatataatttggttcagaaggatgtgtaacagcccaataattagttaaagtaataccatgagaagcaacccaagccatatctggttgttcagcagcttgatcaaaatcagtattttctaaccaaataacgacaaatctatcgaattttttacctttaacatcagaagtccattgtaaagttttagcagaagcagcagaaacagcaatttcacttgcacttggttcaataactgattgagttctttcaacaacagttgaagatgatgtagtatcagcagcatttgaagatgcaataagagaagatgcaataagagcgagagttgataacttcatttttttagatacttttgatgatgaaataggtttttcttggctaataaagggagaaataaattatgatagtttggatattgattgtggcataaatgtgggtaaattggattcattttataaaagaaatcttgataataattagtactagtacaatattaagcaacggttaatttaattaacagaataataaccgtttcagtgggtataataattaaatatccactttgtcttaaaacgtgcagggaccaataattaacctagtattcataatcataatcataatcataataataccataaaacgataataatcataattcaaaactccgatggtaaataaaataaaataaacttttaatactaagcgcggcgctaaagtaatttccacgtgtgttcccttaataataatattaccactatattaactcttattggttattattataatcttataacaatatcttatcatatataacacatgtgtgtagtaagtaagtgtaaataacatcaatataaatatttaaaattatttcattttatttcattttatttcttaaaattattaacctggtaccaacactatgaataaaattatcaactgttgaaatatcattccttgaaataatttcaccttcaattgatacaatactttcaagtaaccaaattgcaattgaatatcctctctcacattcctcatacctttctctaatttttgtttctttactatcagtattatcattattatcattattatcattttattttattttcattttcattttcattaattttctcaatctccatttctttaattgccgtatccctacaaatttcaatagctctatcaaaaataactttctcaaatataatattttcattcttttcatttttattattaccattctctaatttattaatcttaatcttcaaatattctgccttttctaatgattcattaaatttatttctaatccattcaatcaattcaacaatcttattattattattattattattattattattattattattattaaagttcttaaatttattacttttccaccactcattacaaatcttaattgcttcacttaaataatctaatacttttaaataaataattaatccttccttacttgtcttaatatccatttctctcaaatatgaattattatcattataattataattataattatcattatcattatcattaatatcatcagcttcatcatcaccatcataaacttcttcatatttaactaatccatataaactaatacaatgtgacatcattgctaatctttcaacttctctcataaatttatcgtcaattagttcatttttattttcattattatcattattactattaatatcacttaattttctattaatcaaaccacctctcataccactattggttctattaataataatcttatcaagatacttttcttcacgtttcttttctacctcttgtcttctttcattgtccctttcttgttcttcttccttacctttctccttttctttctctatttcgttatcagcttttaattcattatcgagtcgttttctaccatatccccttgatgttaaattagctccaaataatttctcactagtataatctaatacttcctttaatgctgtacttggacttacactcaatgaatatcttcttgtattcatagaattctttcttattgaattataaggtctaccattattattatcattattattgttgtttgccatttgaatctcatctgcaaatgaatttatttcaacatttcgcctttcaacgacaacataatctttttcaaccacaacgtcttcatccttgattttatttttaggtttacttgtatttgttgtgggtatactagtttaattgattatcatcatttcgaatgttagcattttgtgcacctttcaaaatttcatccaggaaagtgttcttagctttgattttagtgtttttatttttcaaagatttatttttcgccatttctaattctttttctttttctttttctttttgttcaagatattttttatttgcttcaaaactatcaccaccaggttcttcttgaattattgatattttattaccttgatcaatttcattatcatttttaactaatggtttaccaattaaatattcacttacatacatttcttcattatcaaatgaatatgtaattgaatcttcccttattgatgattccattaaataatcatttgaaacaattattggatcattgaagaattcattaaatcccattctatcaattggatttgcctttaataaactacaaattaatctctttaaatcaggtaataaatcaatattatttgggaaagttataatatcttttgatttttcaatttttttcaataattcaatatgatttgatgctctaaatggaggtttaccaattgtcatttcataaataactgtaccaactgaccataaatctgcctttgcattatatttttcatatcttaaaatttcaggtgccatatataatggtgaaccacataaagtttcagccattgaagttgatggtaaatatcttgcaaatccaaaatctgcaacttttaaaattggtaattcccataatccaacataattattatttataaaatcatcccttgtatgaactggagtacataaaagtaaattttgtggctttatatctctatgaattaaattttgactccttaaaaataataatgcagatgataattgtttaataaaatttattactaatacagtatttaaaccattagaattttcaggtgaaggatatttttccaatacatttttaataattggatgataatctgccaattgttctctcttccttataaaataagataaatcacctaatgaacaataatccattattaaatggaaatattgatcagttttaacacaatctaacaatgaaacaatatgtggatttttcaaatttcttaatattttaatttcaattccaagattagttacaagtttttcactcttcaatcgattacggaaaacacttttaattgcaacagttttattattattatttaaatcattacctttataaacatttgcaaatgagcccctaccaatttccataccgattcggaaatgtgaaataactgatccgggaccttcggagacattggaaattgatttgtgattatttttagttgtgtttgacatgttcctagttgtctctaagtgtaataaccaatgtaaaacaaaagaaaacagtaataactcatagaatacgccccttacaacaggagcataaacaaggtcatcacagtaaaagtcttaaattgtgacacatcataataaataataataataatttgccctcgcgataagaaaatgagttttttcctttttcggtatatttaactgataaggatcagatcatcttcaatttcaattcttatctaatgttgatcttttttatgttgttcttcttttcttttctcttctcttcttttggtatggactttcacactttaatgtctactgcttccactctttgttggtgtgtggctcttttaccgcaaatttaccacaattactcaactaaatcagttcacggtttatctccctatctattactcctttggcttttgggtgatacatgtaatttaattggatgtatattaactgatcaattaccatttcaaacttatttatcatgttattttgtattaagtgatatcatattagatttacaatacttatattatcataagaataacatttctaatgatgatgagtttattgaagaattaactaattcttctattgaaatgttatcagaggatggtgcctattatacaacggataatacaatagagaatatatcttcaaacacaacagcttttacaccaatactttctaaaactcaactgattacaactacaactgcattgatctctatttcacctgcatcagctatacccattatatctactcaatcatccgagaagttattaaatactcattttattggacttttatttgcttggttatgtactataatttattgttcatcaagattacctcaattatatcataattatcaaaggaaatctgttgatggagtttcaccacttttattcacatttgcattattggctaatttaacttacgcaatttctattcttactacagaattaccattaggtttatcatataaggattttatattgagggaattaccttatttattaggttctttggggacagttttttgtgatttaatctatttttggcaaagagaattttataaacaaatatagtttaattaattaattaattagttaatatacccaataaataataaatcaatgtaaaaatgtaaattatacaaaaaatacttttagaatccagtaaaataaccagattgttgaccaaattgttgttgttgtgccatttgttgttgttgtaacatcatttgttgttgttgttgttgttgtaatgccagttgattcaatgttaattgactactacttgaagtagatggttgtgttgtaaatccagtttgttgttgtagtggtggttgttgaacttgttgttgataacctgtagccatttgttgttgttgataaccattactcatttgttgttgtgggaatccatttataggttgttgatatcctgtattcatattaggtaattgttgttgatatgatacaccagtttgaaatggattcatagttgcttgttgttgttgatttggatcaatatattgttgtccattaccatcaacataataaatattaccagttgttggatcaacatattgataaatttgttcagatttattaatatttgcactttccattagttgaatttcgaatatcatcatctaaccaattaaattcaccctgctttggtagaatcaaatattgcacctgttgattgtttacgttgtggtaatgatggattagaagtattggaagtgccgttattattattattattattattattattattattattattattaaatggtgatggttttttacctgctttttcaattaatgcaactgcttcattaatattaccacgagtaattactaatgcttcaacatttaaatcttcatcctcatatcccatatcaaatttcatttttctactttgatcaccatatctacgatattcggcatcaattggctttctgaaaactattttatttggccttgaagaattagatgactgttgataaattagatgatgaatatctaccattactactcgaaccacgagataaataaggtcttgaattatattcaaattcacgactattacctcttctactactactgtactcataatcatcattatcatcatcataattattatcataataactacttctagctgtacctgttctttccaatcctcttctcatcgatcttgtcattttactgacatctttataatctgatgaactattgacatatgatttatttttactaatattattactactactaccaaatcctaatgcattagataatctacgaccagaacttggtcttgaatttgtagatgatttatcatacccccaatcatcagttctatcaccccaatcatcatccaaattataatctttatctaaaactgcaccatatttatatttaccagtatatttattccttaaccacattgttaaagaatctttatcatcagcatcgaatgggaatggaatttgcttttcattccaaaattgattattacgtttattaccaattttacccaatattgataattcatgatgactccattcttccattgataatgatttaactcttgaaatatctgatccaagtgaacgatgtgcacttgcacaattaccacaaaggaatacacctaaattccatgatgcccatgttggattatgtgccttacattcaccacatttatttctattaactggagaattcaataattctaataatctttgttcctgttgattctgtttagccattgtcaattgattgcagtattaaaagaaaatgtcctatataagagaaaactgcaatgatgaagttcataaagttaactgaaaacttagcccacgctatttccatttttttaatcactcagccgagttctattaataatggagtctttcaatgagttactttactttactttactttactttttctgttttgtttataaaagttaatgtagacggtataaatatatggtatataatagatgcaatatgtagtatatatgcttgaaaaggtggtataatgttgtaataataatattaataaaattaacgataatgaggattcctcggaggttcaatattaagtccagtaaaccatcttggaacacaagacataaacttccaactaaattcatttgtatgagcacatctacaattaagttcatttcttgactgtttctctcttggacaattaccaattcttccatgataataacctgtattatcaaaatatttaatttgatcaggttttaataaataacttacagcaattgaatgaattggtgcatccccccatctttcataaaaaaaattcccagtttcatctaatgcttggaaataaccttcatatattggatctctgaaaaaatttaaatttgcaatttcaaaatttgaccaataatgacataaattataattcccacgaattgaagtttttagatccataatcagtttcaataaatcctaatgaattattatcaggatttttaatatatttttcaccatcttgaattgataaattccaagaaggtaaattttcaaaataatcacgacttgttttccataattttctaatagtttttttatcttcacccattgcaatgataaatccataagttttattttcattaatcatagtttcaaacatatcatcaggtaaattacaagtaaatttaacatcaggttcaactctccaataccaattaaatttctctaaagcttttaatttatagaaaaatcctgaattaaatctacacatttgtctatatgataaattatcaccatataaaactttattctctttcatcatttcaaattgatttttcattaaaactttatcaattgaatcaggtacattccaatattcttttggtattgttgtgaaaattgcatcaccgctaactaataaagatattgaatctttaaattcttttgtaaatggaacatcatttgcgaaaacccatggataatgatgatttttattaaaccttttctcaactgtatgaatacttttagcaataccatttaaatcagaatttctacaaattgtgaaaaatgttgcatctttaacagttgggaaagtaccattaaaggaatccaaacttttcaaacgtatttcaatatcatcatccttaacaatacttgaatttgaattattatttttataataattaaaatttatacttggtaataaatttgttgtatcaaccataaatgaaaatgtaataagtatacatactgataaaaatgatattatcaccaagagagacaatgtacgatatgagactctattaatacgcatattgtgtatttataagttcctcataaaatgcggtactctcaatcaaacaagaggtatattaaaagggaaattcttttggtatttaatctgttaattcttcaattgttgatcagcgtatatattatataattttcacccacagtgtataaaaccgttactttaagggaacggaagcaggaattgccgatagagtcagtttaaaacttttaagccccaatcgacgcgtctgcagtgccttagagactacgcgtcgatgggaggcttgtcaatattttcatgaataatttttattaaatttttttcactattgcctatttgggtaaaatgtaaacatccttaattatattaccctttatagaaaagtttcaaattatctccagacaatcagacagtcagacagtcatttgatatttgaagatctgaattaaagatctctaaggaaaaaattggtttagatattaattaattaatatttgatcatgtaagggtttccaaatactcttttcatatttgtatagtattttcatatatcatttcttttaattatacatggttctaactatggctttccataagctatactgccaaatcattctaatactgacactattcacagtgtcaactcatgcaaatatatctcaaaaaactttttatgattataataatagaactttatacatccatttaaatgataataatagttcaattaataataatacattattcaaaataccttttaattcacattttacttcaggttcagatttatcctcttcaattataacacccccacctaataatctatgtgagatagtttatacttctgcttccttatatgcattttgtccaaataacaattacctgtctctatatcaatataatcatagttcaaatagttgggaatttataaatgttgatcttaacctaccttattacttagattctaattacctctacacaaattcagataataatgcaatttatattttttcaggattaatgacaaacagcaccaaactctctgatcaaatgttaagattagatttaaatactttacaaatatccaatgcatcttcaagaattcaacctcaacctttctataaatcttccaccgttcaaataaatcaaaatactcaagctttactgggtggtatatcatctgataattcattagttagtatgatggaaatcccattatggcaatataatagttgggctgagagaccctcagtttcttcattatctagaggtattgattcaagaataaattctcttatattacctatttttgatgaatcaaatttatactttttgaataatagtatttcatcatttgaagtttcatcccttttgttattaggtggtaaagatttaaatgataaaaatgtgtatcctcaaattgcatcattaaatatttcaactaatatttggaaatggaatgataaaactaattccttattagttgctaataataatattaataatggtagtgttacacttaatataagttcaatcattggtgctgcgacaatttatgatgctttgttaacaatctcaaataatgataagaatgaatatactctaaacatctataatgcaacaacatatgaatatttaaaagatattgattattcatcattgagtaaattacgttcaccaatgataattgttcataataataaaaatttaatcatagcattatcaattattattccagttttattaataataattattacatgtcttttactctggctttacaaaaagtataagataaggaaagaaattgaaatgaatgaaagagaaatcaaagaaattgtagatttttatgaaaatcaacataaacaaaattcaaatattacattctcatcattagattcagattataaatcttctgataatgaaaattataattatttttataatggtattaaaataaatgattataatggtgataatgaataatggtgacaatttatcaattgattcatggaaacgtaaaagaagagaatttgaaaatcaatatcaatataaatacaataataatgataatgataacaactttccaagttcaaaacttaacttttcacctaaaaactttaaccttgtttctaaaactcgttcaaattcattaatgagatcattatcagttgcatcaaatttcattaatgactcattatcaagatctaattcaacaaaatcatcacaaccatttatatcatctaataaaaatatcattcaagataatccatttgaaaatgcagaagtaattgcaagttctgcatcatcaataaattcattaaacttaccacaacaaccaccacctgcagttccgaaacattcaagtttactctttactccaaaaaataattctcataatagtaattcattattaaattatatacctgaaaattattcagttagtacattccattcacaaacacttggttcaataccattattagttaatttacctcaacaacaatatatgaataaattaaataaaagaccatcaatttgttcaatttcttcatatgatgataatcaagtttcagtttatccaaattcatgtaattcacttacatctagttcaattaataaatctagaagtagatctccaagtaggtcactaagtcgatcaccatcaagatcacctaataaaatatcacataaaacttttggtagaatttcaaatagatcatcaatcagatcatctaatgattatgcaaatccatttagaaattcagaaattaatacaatatcagaaaatgattatgattatgataaaaagttgatgaacatgatgatcaaggctctataacggatgatgaaaatcttgatgttcaagttttagttggttgtaaaagaagatctaaactaaaagttgttaatcccgatgcggaaagtaatcatgataatgaagatagcaaatcattagatattgttgatatgaatgttgatgaaaaaaatagatgtacaagcacaggaagtcaagaaagtaatgatagtttaaggaaaagaaatgtaagtggtgaaaaggtaaaggatgatgagtaatagtaaacttttataaactgtataataaataagttgtgtaattttaaattgatgttaatactaataattatattgaacaattttttttattgaattaagtaaagacaagatataaatggatataaatgaatgtgtgaatcatacataataaaagatcagatcaatcaataaaccacaccgaatgaagattctcttgatttttgaattaaataagtatcagcaagtactaaagctgccattgcttcaacaattggaatagctcttggaacaacatttggatcatgtctacctttagaatttaatacaccatctttaccatcataagttgaagtattttgaccttgacaaatagttgcaggtgatttaaatggaactgaaaaataaatattttcaccatttgatataccaccttgaataccaccactattatttgttatagtacctaatctatcacctttttgaataaatggatcattatgttttgaacctggaattttagtaccttcaaaacctgaaccaatttcaaaacctttagatgcaggaattgataacattgcatgagctaataatgcctctaatttatcaaaagctggttcacctaaaccaattggtacatttctaataacacatgtaacaacaccaccaattgaatcatgttgatctctataattttcaacaattttagtcatttcttcagccttttcaggaattggacatctaattggacctgatgcatcaacttgttctcttgttatattttgtaataattccataaattcattattttgacatgatctattaatttcacattcaccaactgatgaaacaaatgcaacaatttcaacatcattaacttgttttaaaaatttttcagcaattgcacctgctgcaacacgtccaatagtttctcttgcacttgaacgtccaccaccacttgatgctttaataccatatttaacttgataagtataatcagcatgtgaaggtcttggataattatccatatcagaataatcatgaggtctttgatctttatttttaataaccattgcaattggagtacctaaagttttaccaaattctgtaccactttgaatttcaactaaatccttttcattacgtggagttgttaattttgattgacctggacgacgacgtgtaagttgaggttgaatatcttcctcagttaatgacatatttggtggaacaccatcaacaatacatccaacagatttacagtgggattccccataggttgtgacacggaaaacagaaccgaaagtagacataatgtgcttgttctaagaggatattccagaaggaagaggtagtgaaagtggtgaagattttgacagtgtcggaatttttcaccgtgacggatgaaaaatttgtgagtcatcaatgtttgaagactttatttcttgctctttgctattacaatacttatacttatacaatacacaaactagtatacaccggaccatgtccaaactcttaccatttcaccctgtatctctacatcttccactagaacattactatttttctcaatagttcgtacagcctttgcccaaactttttgtcgactatttctcggaagtgtgtgtagttgaggtaggtagaaatcacgtaattggatcttggcaatatatttaacaccattagtaatgttcttcctctgttgttgtagtttagttatactatccttaatgatataacgataacattcattttgacgctgaatctcattgatcttatagaaaatgtatgaaataaatgtcagtaatgacgttattgttagaatgtataatttatatttgagtaaaattgtaatgataaattttttatacgacatttgaatggtactttattcatagaaatagaccttattaactcattattgaattttatatcagttctagttgttaaaactaacttaactttattccaaaaataattatagttttcatcatttatatcaataagtaatttttgattgattatttcaataatttgatcccatttcaatccaacttcttcatctgatccctcaccacatttataattaccatttcgttcacttaaataatcagctactgatttaactattttatttattcttttgatcttagttgaatctaatttacatgtggcatatgttggaattaaacttgaaagatagaaaaaccctttagttaatgtataatctggtaaacattcaattttagaattttcagaacaaattgcatgaggtggacaattgatacattttaaatgtaaatttaacatgtttttaagtaaattagggtggagtttccctttcatgtccacaaaatccaacttgtattctctcttgtctgtaaataacaaaaatgaatgatataagtaagactgttaaccaagtgaagataatcttcagatattggaatttatagtacttaaatttttcataattgtttaacttattaagctctttatcagactcaatttcaattcttgaattttcaatttgaaattcattttgtaactttagtcagtaattcagaatcatcttcaaatgttatattatttagagaagttgaaaatgattgtcgatgaatttatattttcatgttgattctaattcattagttgttgtattaccattagttattaatttaatatcatccttaatttcattcctcaatgaattaatttgttcaagtttgactttgatatctttttcaactgtgatgttatttataggacctgttaagacttgtggtggtggtaaaggtgatactggtggaggtgatacggatggttcatctctatgtgtgataattgtatcatttgtatcattaatatgattccagtatatcattatcttcattaaaagtactattagctattggattagttgatggttgcttatattgatatttatgatcatctggaggtggatagtctacagtattagtaatttgatgttgtttttgatgatcaatatcattatcattatcagttttttcaaatgtggaatctagttttaattcactatttctatcaaatagattagtatgttgtttcctttcactgattgaaggcaaacgtttccttttaattctcttttgtaaaacatttgaataagttgtatcatcattagtcatagatatgtcatcatgttttctcttttgaccaattaccagtccctctgtgggatgtaaattatctagggaatttccatcatcattatcatcattcattatcaatttcattgttcactattgttactattgtcacttggtggtaatataagtgatttccataatttttcatcatctttatcgctagtagtagtattttcgagtttgttttccggtattggtattggtattgaatcttttggatcattcaattggttcagatttaaccctaataggagtatttgatgtatcttcattattattattcttttcagttaatttaggaactaattttgtaattaaacaaattaattaaatcagctttcctatcctttgtaagtccattgaatatcaaattgagttaataattttccttaaatctactacacgtagagtagatggattaaaattctcatctgtatagttcattacaaatatgtgagttatatactaaaagagagaataataaaaaagaaattggtattatataatgaccatgtagaatacttcttgtaagtatagtactatactctaatgatattagagagagttagtacaggataatgatacctgtaacatcctgaattcatcaatcactttgaaatgtaaataaaaatcatgtaatggtaatattgtattacgtaatattagacatggtaataaaatgaactgttaaatagttacaagctttatataagaaagcaataattggtagctactgaaataataaacttagttgaattaatatttagtatttaattgtatgaaaaaaataaagagtgtttgtaaaaaaagagaggaagtattatactcaaacttgcagagtttctccaaaggtagcaaagtaacctttaggcaatgttaacctttcaccattcttatactgacttgatataattatcatgcctcttcaagcatatagtcaatttctggtaaattattgttaatctgttttttccattcatatgaatcaaatttttgtaacttattcatcataaacctagccccgtgttgaattggatttgcaagtgaacaaccatttttaaaattaactagtttaattgtacattttttttctttcacttttgataaaattttagaaagttgtttcatcattgatttgttaattaaatcatttcctgtaaataaagtagagcaatcactttcatagaggcataaaaataaatgccaaattgaaacaggatagttagaaaaatatctttcaaagtctgaaaacgtatcggggtcaagtttttctcttaaaatgtctttaattaatagaaatttttcaaaagtgcacttcactatgttgtgaagatgattttgtaaaagaaattaaatattcaaccatatcagaaccaaatttgataactgatttatctgcagctaatgcaaaatttctcttatgtgataataagacagtatcccagtaaagtatatcatcattttgagtggactcaatcattttattaagttggtttcgtacctgcagaaaattcttggcccaacatcaacaatgaaaaatctcatgctgtaaccaaatgatgtccaagcacatttgtttaaggtaaaatttgaatatttagcattgattattttaagtgcatcatccataaaatatgtttctagactttccgataaagaagaggatgatgaagaatgtgatgataattttatatcttctacacattcttctagggttggtccaacaataaaagctttagcaaattcctccttctttaaggatttaatttcaggattttcatccattaaatgaactaatttctggaaaaacaataaaattaatttagtaataaggtcaggttttaaatctttgaaatgaattttttgacaagtaatacgacttccagtaagaaaatttctatcataatcataatcatcatcctcctcgtcaacacaattacttttttcattgtagtaattaaatagtttatctgattctaattttggaattaattcagatttaaataatttaattaaatcagacttttcatttttatgatggtataaaataccatgcattgctaataattcttgtaattcagccaagttcaaagttgatggatcaaaatgagtatctgtgtaattcattggaaattgttactctgtgaataaaataagaagaaagtaagaagaaagtaagatatttttccaccaaaatatgaggatcccatgctttataaacaaagaatcaatcaaaacagagcataaatactagtactattacaagaaatgtgacctgtcatattgctaccatctcttatgtaaataaagcaattctcaaagaatgagtcgctaccaaaatagaattagtctggctatgtatttatatttaataataaaaaaagaaacggtagttaataaataaagaaataaagtattataaaggttaacgcatatttaatgttttcccacaggtagcaaaataaccatcggtaaatgttaatctttcaccatttttatgtgatttaatagtatttatctgcctcttcaagcataaagtcagcacttggtactattcttgcttcttttggacttaatgtacgaatcttgtaatctgtgtataataaatttagcaccatgttggattggatttaaaagtaaaccaccatttttaaaattaactacattaagtctacaatcttttccttttaataatgataaagcatatgaaagatttttaagtgaggttttattaattgaatcatttcctgtgaagattgttgaacaatctgttttatcaagacatgaaagtaaatgccataaagcattaggttctttggataaacatattttaatttttgaaaaagttgtagaaattattgactttttccattaataatttttgaaaatcttctaaaaatcctggagtacttggacggtattgtaactttggtgatgatctagtaaaagaaaaaaaatgttcatccatagaggagcctagattaataactgatttgtctgctactatggcaatacttttactttcggatattaaaactgtatcccaataaatgatatcttctgttggaattgattcaattttttcaatcatagcatcgatattattgaatattcttggactaatatttgaaacaagtaatctcatattaatgataaaagtcttcccaagatttttttacttgctgtgaatatatttttattaaaatttaataattcaattgcatctttaatgaatgtattagaaagaaattgttttagaaatctttgtttggttaaagattttaaatattcaaaatcatcgtcttcatttaataatctaatatagtattgaaagaataaattaactaatttagcaacatctttatggtgtaaatcacaaagatgtatttttgcattgttgtttttgaaaagcatgagtttatcataataatcattatcactatcatcatcactatcatcatcactatcatcatcgctactattatgaacaccatgtttttgaaaataattattaaaagcttgtgattttagtattggaagtaatttattttcaaataggtcaagcaaatcttgtctgtcataattagaattaaattcaatattataaacagttaataattcctttaatagaggttcagaaaatgaatcgtatgtacatattgctctaccaattaatcatgtaaataattacgtaatcaacaagaacatgattacgtaatcaaaaaaaactgaaatgattccaatacgtagtaaaaaagaaaaaagaaattaaaaacctcagaataaaattaaaatcataccataaatgaaaataacattaataaattaatccgataagatcataattatccgaaatctccttacaaattcggatcagcttatcccacgcaacatgacagtgtctctattttataatgtttacctatatttgacttttaatcggtgtcctcttagcactgtctcacaattataaatagttacccatatcccatcatttctctcgtttccagtttttgttctattttatatctcttctttctacatccactcaattgatcaatttataatcaattagtatattatatattaaacaacaacaacaaaaaaacaatcttactctattatgtcacaaatttctttaggtacttatatctttgaaaaagttaaagaagctggtgttcattcaattttcggtgtccctggtgattttaatttagccttacttgatcatattaaggaagttaaagatttaagatgggttggtaatgcaaatgaattaaatgcaggttatgaagctgatggttattcaagaattaatggtttcgctgcattagttacaactttcggtgtcggtgaattatctgctgttaatgcagttgctggtgcatttgctgaacatgtcccattaattcatattgttggtatgccttcacaatctgctgaaaaggctaaattattattacatcatactttaggtgataaaaatttcgatgatttcgttaaaatgtcaagtagaattagtattaaattaaaggttattgaagatttagagaaagctccattacaaattaatgatttaattgaaactgccttactaagactaaacgtccagtttatttaggtttaccaagtaatttctcagatgctttaattcctgcaagtttagttgatgaattaaaattaaatattaaccttgatgataatgatgaagaaactgaagatgaatttgttgataatgtcttagattcaattaaatcctgctaaagaaagccaattattttagttgatgcatgtgcttctcgtcatgctgcaactcatgaagttgaaagattagctaaattaactaatttccctgttttcactactccaatgggtaaaggttcttttaatgaagatagtgctgaatattatggtttatatgttggtgcattatctcaacctgatgtcaaagaattagttgaatcaactgatttagttctttccattggtggtttattatctgattttaatactggttctttctcttataaatactcaactaaaaatgttgttgaattccattctaattattgtaaatttaagagagcaacttatgatgctttaaagatgaatggtgcattaaagaaaattaatgctgctttacaaaatgaaaaattaacttataaatcattacctgttccagcttctaaatttgattatcaaactgcgaaggaagttccaaatggtaaattaactcatgagtatctttggaagagaatttcttatttcttaaatcaagatgatattattgtttctgaaactggtacttcatcattcggtgctttaggtactcatttaccaaaaaatgcaaaggcaatttcacaagttttatggggttcaattggttttgcattacctgctgcaattggtgcaaatttcgcagttgatgatattaaaaattttgataattcaaaattagaaagtagagttgcattatttattggtgatggttcattacaattaactgttcaagcaatttcagatgcttgtagatggaatattaaaccttaccttttcttcttaaataataatggttatacaattgaaaaattaattcatggtccaactgaagaatataataatattcaaccttgggatcatcaaaagattttagaattatttgcaaataatgctgaacatgaaagtttagttgtctcatcttgtaaagaattagatgatttattaaaggatgaagcttttaataaggcagataaaattagagttattgaattaatgttagatgaatttgatgctccagaaattcttaaattacaagcaaaattatctgatgaaattaataaacaataattgaaatgatttaataccattctttatacttttctgtataactcctttatattaattataattaacgaacaatatttaataacttataaaaagtgtactatttaatctattttaatctatttaaaataatccttcaatttcaccatcatcattaacttcaacattcataaaacctgcatgagtacttaaacctggaattgtcataattttatcagctaatgcatataaataacctgcacctgcactaattctaacttctctaattgggaatataaatccagttggaacaccctttaattttgcatcatgacttaaagaatattgagttttggcaatacaaacaggtaatttaccaaatccttgactttcatattctaaaatttgtttctttgctaattcacttaattcaatatcttttgctccatacattttagttgcaattatacgtaatctatcctctaatgaaccatttaaatcataaaggaaatttgcaggtttatcttcatctaatggtttttcctttgttgctctaacaactgccttagctaaattaattgcacctaaaccacctttggaccaatgatcactttcaactgcatcaaatgcacctgcttttaatgcttcctctctaattgttgaaatttcattatctgtatcagttgcaaatttattaattgcaacaacaactggagctccataactaattgcattttcaatttgtttacgtaaattactacttgcaccatttttaactaattgaatattttcagttatatattcatcaggtaatatttgacctggtttaacatcaggtgcaccaccatgtaattttaatgctcttgtagttgcaactaaaacaacaacatttggttttaaaccacttgaacgacatttaatattataaaatctttcaccacccattgtaaaatcaaaacctgcctcagtaacaacaaaacctttttcgaatgaatcatcattaatactttcttttggtgtaccaactaattttaatgcaagtttatcagcaataactgatgatgcaccaattgaaatatttgcaaatggacctgcatgaacgaaaactggtgtaccttctaaagtttgcattaaatttggtttaattgtatcctttaataaagcagtaattgcacctgcacaactaatatcttcacaagtaattggttcaccatccatatttgaaccaataacaattttaccaactctttctcttaaatcttttaaatcttttgataatgctaaaattgccataatttcacttgcaacagttatatcaaaaccagtttgacgtgtaatacctttttcagttggtgcttgaccaattgtaatacctcttaaaaatctatcattaacatcaacaactcttttaattgtaattgaatctggattaatatttaatttagcaaattttttaatttcttcaattgttaaatcatcaggatttgttttattaatacctaatttctccaatcttttcaacattgaaattgtaaattttctaataccatttttctttggaactaatcttttataaaatgcatcatccttttgagttttttcatggaaaattctagtatcaattgcagctgctaataaattattagcaatactaattgaatgaatatcaccagttaaatgtaaattaaattcatccattggaataacttgtgcataaccaccacctgctgcaccacctttaacaccgaaagttggacccattgaaggttgtctaacattagcaattgcaggtatatttaaatgagcacctaaagcttgaactaaacccattgtagttgttgatttaccttcacctaaatggagttggtgtaatacctgcaactaaaacataattaccattattacgtttattttttaaattttcataaacattaagtgatactttacctttataatgaccaaaattttcaaaatctttataattaatacctaattcattagcaacttcattaattaatttaggagtttgatttcttgaaatttgaatatctgaaggaacatggatctaataaatctaattttaatggtttaatatttaatggtttattaagatgtttaaattgatttaatgcagccttataaacattttcaattaacattgcaacagtcattggaccaacaccaccggggacaggtgttaaaaatttagcattttctttaactgattggaaatcaacatcaccaactaattttgaacctgattttttagttgaatcaggtaaataattaataccaacatcaattacaattgcatcttttttaatccaatcacctttaacaaaatttggtttaccaattgctgcaataataatatcagcatttgagataattttatcaatatttgaagttttagaatgacaaattgtaactgtacaattttcatttttcaacattgttgcaacaggtgaaccaactatatctgatctaccaataacaacagcatttttaccttccaaaggtatacctgtttctttaagtaattttatacaaccatttggtgtacatggaaggaaatgaggggagccattttttttagataattcaccaatattaaatctatgaaatccatcaacatctttaattggtaatacagaattagttattttaacttcatctaaatgaggaggtaaaggtaattgaataagtataccattaactgaaggatccaaatttaaatcattaattatattaagtaaatttaattcatttgttgattcctctaagtttaataatttgacaattaatatttgaatttttacttgcatttaatttcatacgaacataagcagaggaatctggtctattaccaatttgaataattgataattttggttgaaaatctgggaaaatttgttgcttagataggattttagatgagatattagatttaattgaatttgcaatatctttacccttaaggatagttgcttgataagtaagtgatgaagatgagaaatttttataaagaactgaattagttcttaaaatactataagagttattaactctaatagatttagttgattgtctaagcattttgattaatgaaaagatgtatatagaaagggttagcttgttgaatagaaaaaatttactaaatgtgaaaaatgtgccaaaaaaattttttaaaatggaagtgaaaaattagaataaaattaattaatcacttttaaaaatacaggtgcatgtgctgaatatttaaataagaatgataacaagatataagatggataataactgtgaagaaggtaataattgatgataattattattatagataatagattagagtctattaagagatgattacaaaggagaagtcaattatattatcaagggtctattattttgacttctgcaggaaagtaagtgacttctacgatgttttgacttctctatatctttaataaaaatattgacttctcgtttattacgtaattgtattatattacgtaattgtattatatttacaagctgtattaaagtattaaacattaattataattattataattatcatataagagacatcattttctagctgaacctcttggtctatccttaaatttattcttattttcatgtttaccctttcttgttttaaatccaccctttagctaaaaccccccatggtgacattgatggtttattagatttagatttacctctaccaccacctaatggatgatcacatgtattcattgcaacacctctaactgttggtctaatacctttatgtctatttctacctgctttacctaaactttcattatgatgtgcactatttgatgtaatacctaatgttgcacatgcctctaattgaaacatatctttgttcacctgattgtaattgaataattgctttaccttcaattggtaatttactaacaattctaccatatgcacctgcagctctacaatattttgcattaccatttttaaattctccaatattatgaataattgtaccaactgaaatcattgaaattggtaaacaattcccctttttagatattttaacatttaataatgcaggatcaattttacctcccatttcttttaaaaatctattaggaataccactacggaaactttcaacttcatctcctggtctcataccttcacatgcaattatatatgataattccccagtttcattatgttttaataatgcaatatgtgaagttctatttggatcatattcaattctcaaaactgtttgaggtccaggtttatttctcatataatcaataattctaattcttctttgaacaccaccaccttgatgtctaacaacaattctacctgtattatttctaccagattttgcaactttagtaattgttaatggtttataaggtttacccttccaaagataaggataaattggtttcctccaccatctaatacctggtgatgttggtttaacttttttaagttgaactttctccttctctaattccatttgtcttctattaagttcatcttgtttctctaattctgttagtcctgagagggcattagtagtaggtatagttgaagctaatctataattaaagaaggaagtaaaccctcctactgttctagatttagatatataattcttaaacatctagcttgctctacagtatattctccaataagtattgtctaatccttatacttactctacttatattcatgtcgacaaagtaaaactgaaaaatttaaaaaagtaaaataaaatcagaaaagaaaagggacgatcgacccaaaccaatcgacgcgccgacccctcctaataataaataatatccaatcaacgtcttggaaatcttctcactctttgaaatttcagcttttgccattttaatttgtatagagggtgttattagagaatacttgatataatagatatcttaatttatatcctttatacagacaacacaatggcttctcgtcaatttatcagatctttagctactgcaactgctaatattaaaccacctgttcaacttttcggtttagatggtacttatgcaactgcacttttcacagctgctgcaaaggattcaaatgttgaaaaaacttttaattcagtttcaaaattaaatgaaacaattgcaaaagatgttaaattaaataatattttatcaaatccttcattatctcttgattcaagaaatgaaattattaaaactgtttcatcaactttaaaattagaaccaattgttacaaatttattaaatgttttatctgaaaataatagattagaattattcccttcaattgcaaaacaattttcagttttaaattctgctttcaatggtgtcgttgaagctaatgttatctctgcaaaacctttagattcaaaaactattcaaagattatcaaaggcaattcaatcttcaaaattcgttggtgcaaataaatcacttaaaattactaatgaagttaaacctgaaattttaggtggtttaatcgttgaagttggtgataatactgttgatttatcagttaatgctaaagttaccaaatttaataaaattttaactgaatctatttaatttgagtaggtttaatactacattctatatttatttatttatttatttatattgatatatgatcttactctaagtatagttacatattttaaaacacatttatgataatatatatgcctttatccaataatatccataatatactcgctacgtccatttttaaagtaggatatttatttattagtataccaccttcttttcttttccttttgaattaacttctcttcaatgtaccctatctcacctacttaaatgacaggattacatcattccttaaactcgttatccttaaatgatgatattattgatataactgaacaatttttccaaattgcaagtaaattacaatattctaaaatttcaaaggcaaatgaattttcacttttacatggtactcatgcattagaaatacttaatacaagattagatacttatcttttatctaaaactgattatgatctttcaaaggaactttcattattagatacagttcaaataataattaatcaatttaaatccattttttgttggttaacacaaaacattagtttaccctgtacaattttatcaaatgaatatattttacaaattttaatcaattatactcaaaatggtgaacttaataccatatatgatattataacttcatcaggttcaaaatttaatattattatttataaattttcaataattttaatacaatttgttaaattaatacttaatttagcattaaaatcacaaatttatgaagatgaagatttaaatacaagtacaatgaatcttaattggtttaataatatgactaataatgaaatttttaaaaattctatgatatctaataatttttggaatgaattatataatgaatcaccggaggatgttgaatatttagattttattaaaaattctttccaaattttacaatctttaattagtattgaatcaatatttcaatggaatataccattatttaaacttaatgagtctaaagagtttaatactaaatttcaaaataaacttacacagttaaataatacaataattaaattaaaggaaatgcaaaatattaaattggaatcaactaacctaccaaatggttgctttaatttaaattctcaaattttattggataatcaagcacctcctaaacaattacatatttttgaacttgattggaatcaatgtattttaagttttatttcacttgtttgaagatatcgggaatattttacagactttaaaatcgaaaaattcattagaatttaaggaatggtttaattttttggagtaataaacgtaataattcagatatttatgaaattaatggattacatataattgcaagaataattttttataattttttcaataataattcaattaattatgaaaatattcaactttcaacaaacaatttattaaatattgaaaattatacatttatggattttttttatcaatatttgaaagaaataactcttaaaaatttaaaaattgatttacaatatagtaataaaggctctagtaatgaaattactcaacaattagattattattttgaaaatttatcattattatttaaagaagtactttttttaccatcattaaatccatcaagacaaagacaatttaaatgtaaagaattaaaatattggaatttaagacagaatgaagtacttaatttagaagaatattttaaatcaattggattttataataaatttgataaaaactatccattaacatttacaattatattatttaaattacaatgtattagtgaaattattttgaaaagtattgaattacaattatttaaagatattagagaatatttatcagtttattatcaattaacattaattagttatcaattaaatatccattatcaaaacttaattagtatggttaaattaacaaataattcaaatatgatttatttaacttatttaaagaataaaaataatttaatttatcaattatcaattatgaagtctaaacatttggaaattttaaccatattaggatttaataaattacctaaaaatttaattaaaaacaataaggttaaaattaatgaagaattattatttgatttacaatggaaacaatttaataatataacagaacctgaaatgttaaaatatggagattttaaaaataaaatagatgaaattgaaaaagaatataaggttggtaattataattatattaaaactattaatgaagatattaataatattaataaagaatttaaattatcaaataattttataagaatgataattaaaaaattagattggtttaaagaattagaggcagttaaaattgaagaaattgatttacttaatgaagaaataattaaaagtaataaagatattaaatcgttaatagaagttatggattgtattaaaagtatgatgtaattattgaaacacatactagacattgttatttcccaggatttaaaatagtgaaaaatagtatagaataagattatagatattatagattaaaattaatagagaattatgaatgaatatgataatgataatgatatagcagagtatattggacggtggctagagtgatagcatccgctaagaaagtttggataaacttaccaattacttgtagtatcatatatcaataattgtagttattaaatgtagtaataatatgccttattaatattaacatcagggtatggtgtcacgtgagaggagtgagggttgttcaagtgaagggactgtgtaaataataataagcacacagattacccttttgggaagttttgcacattttaaaattttctaaattttttcaaatagcagtaggtattattctattattattatagagagttagatactatactgattattatattaaatttttcacttgatttcaatttaattatttttttattttcctttcatttcatttcaatagacaatcaataagtaaacaatatgcctccaaagtttgatccttctgaagttaaatacctttatttaagagctgttggtggtgaagttggtgcatcatctgcattagcaccaaaaattggtccattaggtttatcaccaaagaaagttggtgaagatattgctaaggcaaccaaagattttaaaggtattaaagttactgtttgtttaacaattcaaaatagacaagcaactgcatcagttgttccatctgcttcatcattagttattactgcattaaaggaagctccaagagatagaaagaaagataagaatgttaaacataatggtaatattccattagatgaaatttttgaaattgcaagaacaatgagagaaaaatcttttggtaaaactttagcttcagttactaaagaaattttaggtactgcacaatctgttggttgtagagttgataacaaaccacctcatgatattattgaagcaattgatgctggttcaattgatggtatgtattatatgaatttacaaaaaatttccacttttttactttttttcaaacaaattactaacataaaaaccccccaacaatattttattttattacagtcccagaaaactaagttttttatattaataattaaattaataatactaaatataaataaattaaactttgctttttcaaatatgtacaaaattaataaattttctattcataataaacatttctctacgaaaacatataaactattcgtttgtttgctttattactatattatatgatatcatgttctttctctatacttgaaatcatttattattgcaaactaaattaactttgtcaattactcaccttcttattccatgttgttaaattttactgaacaaccacaattcaatttaattgatttgaaattaattttcaaatagtactttagcttaggttattggatccttgaataatttttcattgaaattatattttgattgttttaggtgaatttgatggtccatttcactggcatacattgtaatattgtagtagtaatgtaggagtagtgtagtataagcctttcttatgatcaattgtagtgattaaattgattgaccttaaagaattactcgatttcaaaaaaaattgtttttgtttacatttcatttaatttcatttcagtatctctatgttatcttttctttgactaatcacatttcatttccttcctatcacccaactatggacattgatacattatttattcaagctgtatctacaattaaaagacttactgaattatctaaattaaatggaattccaagaccttcaattaatgatagattaaatttatttggattatatagtcaatcaacaaagggtgatgtaccaaatattttcctacccaatggtgattcatcaaataattatcaaaaatatagtgcttgggttaaatataaaggattaaataaattacaagctcgtgaaaaatatattaattatttaattgatgtattaaatagaacttatgatattaataatatgaatagtgaggtaaattcattaatttaatcattaattaatgaatatagtaaatttgaaaataataaattatcaaatgtgaatgatgggaaagtttcagtattgccaagatcaacatcaccagctgcttcattatatagaattgcatcatcgggtgttaattcaaatttaattagaccaccatcaagaaatcattcatttgttaaatctagaaaaaatagtgttagtattgaaacagataataatttaaatactgttaatgcagttgatattgttgttaatgatagtactgttagtaaagaaactgctaatacaacagttgatagagatgaatttttgaaatggcaaggtgaaataaataatacattattgaaaatatctacacagttaaataatttacagaataatgatgttgatactatcaataatagatcattttcaggtatttcattatttaatccattaaatcatataaatgattataaaataaggacaaataaggatagagtatctacatttaaagaaattgatttcaatccaatgaaaaagagggacgatgataagaatcatatattgaatataatttatatgaaattcaatatgttgattaattatttgaaaaataaagtatttatagagatacgtggaattgattcaattaatgggatatttgataaattagttaaatcttcagtgataatattcatcataggagggttattaaaaagattagttggtgtataccttgagaataatcatactcaacactattcactcttgcaaaggataagagaatggattggaatagtgtattataataataaaacagttgagccccgcagatagacgcgacgatatgggttttgaaaattttattagtattagtaatcaaatagagtttatcggacataaactgtacggaggcaattaatattatgatcattaacattacttctttcttttgtaacttcactaaatagacaatcaatacagtaaataataccaaagatgcctgttgagaaacttcaaaatcatggagcagtagagaaaccttcaactaaacctggtaggaaaccaattatgagtgaaccaaagaataagagaacagctcaaaatagggcagctcaaagagctttcagggaacgtaaggagaaaagaatgaaagagttggaaggatcaagttaaaaaattagaagaggagaaaatgcttattactaatgaatctgaattattaagattacaagttaaaactttattgaaaagtttaaataaaaatggtggtactaataggtaataatggtaatattgatgatattttcaattcactcaataagaaagaattaggatttcaagtaaattgaaaaatgattataatgaataattataattacgacgacaatgataatgatatggatgatgattcaagtccttcaacaaatcatgattattcagatgataaaaattcaaatatttcatcaaatatttcatcaaattcaagtgttacatcaaatacatccaggttcacttacaagtaatgatgaaccttttaaacaaaattctaaaaattatacttttagtatttgtcacacctgaattaatgagtacttgtaatatcaattaataataataatgactataaatcttgaattaaagaataagattaataattcatcatataaggatgaatataatgaaaaatcattttgtcaagaacttaataaagcatgtggttcaaaatcttgtccaattccaaaatcaaaatcaattgcatcaaattcaccaaatgatttattaaataataataatattaataatttaaataatgatacaaattcaagatcaaattctttcttatttaaatcaccattatctggaatgacaccatttagtaattcaagtgaaataacaccaacatttttcaataatgaaattacaaatgataataataataaagagaaagatattagttcattttggaattatgaaaataaagaatttattaatgataaatcaacaacaattaataatgatgaaattaatttattatttaatgaatctgataaaattaaggatgaaactaataaattaattgaaaaaaatccatcagcatttcaattagtttcaactccaacattatttaatgatcaattagattttaatcttgaatatgattttgaaaatgatgcatttgatgatttattacagaaaacagatgaaagtttatcattaccaaatataattgaagatgaaattaatcttaataatgatattaataataataataataataatagtggtgaaggtgaaattgaaaaagtacctgataatacagttgatttaatgaaatgtaatcaaatttgggaaagaattacaacacatccaagatttaccgaacttgatattgataatttatgtgatgaattaaaggaaaaggccaaatgtagtgaatctggagttgttgttaatggatgtgatgttggtaatttattaaaaaaggcaatgaaggatgaacaaaaaaatgctaaaattgatgaaattaaacaacatgatgtttatattaaaaaaatgacactgaataatgataaatcaaataatttcttacatggtatgtggtaagttttgtcttaaacgttacatcttttctaattaattaatcaacataatttctaatgcttttctaattcatatttccaactatctaacctgtatttatactttataacatctgaacatattatattccctaatatgataataataaaacccccgacgcatcgaccgcgacatgggaaaataacaggtgtcgcccctcgaaattttgaaatttgtttactaagagagagtttaagtttaatcaatgatgatgttaaggtgttggatcattatttctttttagtaggacagcaacaatggctgatatttatgagattgaagatatagatggggttcgttttaattggaatactttcccagttactcgtttagaggctgaaaatattgcatctcctgttggttgtttatatacaccattattagctagggatgatttaccaattgcaaattatgatccacaagtttgtagaaaatgtagatcaattttaaatgttttctcacaaattgatatgaataataaaatttggaattgtccaatttgtcttagtagaaatcaattaccatctcattatcaaaatatttcagctgataatgtaccaattgaattaatacctcaagcttcaacaattgaatatattttaaatagaagtcaaccacctccacctccaacttatatttatgtaattgatttatgtcaagatttagatgatttaataagtttaaaggaaactttaattaattcattagatttacatcctcctggtacatttattggtttaattactttcgattcagttgttaatgttcatgatttaagttttacagattgttgtaaaaaatatgttttcagtggtaaaagagaattaaaatcttttgaaattcaagatcaattaggtattaaaggtaattcaacaaaatcttggaatcaacaattacaacaaatttcaactcaatttacaaatacaattaataaatttttattaccattggaaaatccaacttcaaaagatttaattattaattcaattaataatttacaaccttctaaatggacaattaaaccaggtcatagagctttaagagttacaggttctgcattaaatattgcttcatcattaattgaagcttcatatactcaatgttcagctaaaattacattatttgcagctggtgcttgtacttttggtccaggtaaaattgttggtagtgaattaaaggaaccacttagatctcataatgatattgaaaaaggttctgcaaaacattataaagatgctgttaaattttataataaattatcaattaaagcaattggttcaaatagagatagtaatgataaatttttcgataattcatcaacttcaattttctcagttgatatatttgcaggttgttatgatcaagttggtatttatgaaatgaaaactttaagtaataaaactggtggtgttttattagttacagattctttccaaacttcaatttttaaaaattctttcttagcaacttttaataaagataatgatggttatccattaacttattttgatggtaaatttgaagtttttacatcaccaaaattaaaagtgtcaggtgtaattggtccattgtaaatcattgaaaagaaatggtgataatgtttcagatattcaagttggtgatggtcaaacaaatcaatggcaaatgtgttcaataagtccaaaacatacttatgcagttttctttgatattcaaactgttggatcaattgaacaaaaaaattcttttgtacctgaagtttatattcaatttcaaacaacttatagacatactgatggtacatttagaacaagagttacaacattaaatagattaacttcattaaggggtgaattagcaaattcatttgatcaagaagctgcagcagttttatatgcaagattagttgttcataaattagagaatggtggtgaatattcagatttattaagatggattgataaatcattagttaaattatgttcagcttatggtgattatagtaaaaatgattcatcaagttttagattatcacataaattatcacttttaccacaatttatttatcatttaagaagatcacaatttttacaagttttcaattgttcacctgatgaaactgcattttatcatcatacattattaagagttgatgttagagattcattagttatgattcaaccaactttagttagatttaaagctgatggttcagaacctgaacctgttttattagatagtgcatcattaacacctgatagtgttttattattagatgcatttttctatacagttatttattttggtacatattgcagctgaatggagagatgcaaattattcaagggatgattatccaggtgtttatgaaatgattgatggtgcaaaggaggaagctgcaactttaattgctgatagattcccattaccaagatatgttacatgtgatgaaggtaaatcacaagctcgtttcctttattcaaaattaaatccttcagagaatgattcaaataataatattggtggtggtggtggtcaaatgggtaattttggtggtgattcaaatactgttgttcatactgaggatgtttcattacgtacatttttcacacatttagcaaaattagttgttaatgttgcttaatagtaaaagaaaaaatttaatttaacaatcattatgtaaatattaattataattataacattacctttttgtattttatcttttcccatctttctcccaattttccattatataatttttaaagagaattatttagaataaaagtatttgttaattaatgagcaaagaattgtatataaagtagtagttaaaagctaaaaaagttaaaaatatatgttaaaatgaactccaattccaactattgggtatgtttgtaatactttcctttctattattattattattattatcattttcttcattttcaagtaaactatgataatctgttaatttaccttcataatcttcatttgaatctaaaaattttaaccattgattataacaaattggacaaactttacaatatttactataattatttgaaatttcattaattgaattattatttgttttcgatgaattaattgttgaatgagttttataagtttcaattgacataattggtgataaggttatttaagttattattattatattattattattattataaggtctctcaaaatttgcaagtaaatttaaatttgcaaaattatttaaacaatttgaacaaaaaattccaccacaatgtctacaatgatgtcttcttgtaatattgtaaataatttatcacaaaattcacaatttttacattcatcatttaatttccaatgattatgtgatggttcaatatttttatttttattcttatttaaattcttataataatttgaataatcaattgttgaattagtttcagatgttgaagttgatgttaatggtggtgttattaatgattcattaatattatgataaatttcattctctttcttattgattaattgatttattaattgattatgaattttacttaatttaggtgatttggtgaaatcactttgattagttataattgtggaagattcagttaatgattccattgatgaatcttttttattattattgctactactattattttcaatttgcttttgaatttcaaatgttttatcttcaattggtcttaatacaggcggtacataattatctaataatctcctaggcttcttcaatttgtcttacaggtttagttaaatcatcttaataaattttcctctttctatcggtttagataatgaatttgatgatttttttctatttggtgatttatatgtataattactataattggaattaaataatgatgattcggtattgatattaggattattatgatgtgaatccatgctgccagggtttaatgatatatcatcataattatcatcgtcagttattgataatttccttaatttttgtgataaatcataggaagcaggtttataagaagatagaggtacttgagatgagggcttttccgtgctttcctcttccaggctatccaaagtattaaatgatgaagattttgaatttctatttgaatttgaatttgaatttgtatgtgagttaaaatttgtattaaacatagcaggagcagaagttttcctttgcatattagttggtgaatctttattattattattattattattcattaatgaaacaattgacattcttggagctctaattttttcatcataattatattcaaaagataaatcatttaagatattatcaggtaattcatcctttgttttcagaatacctttatattttgaataaaatttagaatgatcaatatctttattaattgaatcacatttttgaggaggatatttattaatacaagaaatttgtgaagatttcctttgaattgtattattacgagaaagttgacgtttattaaatgaaaatcttcttgaactattagttatttgagaatttggtgatgaagaaatttcgatattttctgttttaatagagggtggttgttgggggatatcatttggataattgaattatttggtgaaatatttgaagaagatggtgattagtagtgattattattgatttcattaatttgagcaactgtattagtcagttatattatcataatttttattattagtagaagtattagattctaacattaatgcagatgatggagttaaaggtttgatatttttaatagaatttttaactttatttgaagaagaagagttatgagaattagaattagaattagaattagaattagaattagaagttgatgaagatgatgaagagtaattagttagtaaattactaacagaataatgaatattatcggtattggcagataatgagatagcaggtgataataaaatggagttagtattattaatattaatatcagtattagacttattatcagtatcagtaattgtaatattatgcagttgttttagcattgaaatttgttatacttattgatactataatgatactattactataataacattcacttaataataaattgtgtgtgtataaataataaagttaaattaaattaaactatagaataatcgatgagttaataatatatatgatgatctagagatattatccttctatctatctatctacatgccagatgaataaaaagtaaagataagatcaatgatataataatataataacatagctgtaaattgattggtccgattgcttatctatctctattatctattattctattattttattattatatcttgtcttcattgtctttatttttgattacgtaatatagtttactcctgtcacgtgacttctatagcattacgtaatctgttcctgaataggtgatatagccgatgcttactaaaatcctttatctaatcttaccttatctaatcataattgacttatcttatcgataaatggacataaccttaataatttcaataatcttatcacttatcactatcttttcaattataatattatacaatatattgatcctatttcggttcttacttttactacttttggttaataaatcttttcctttatcattcattgttccgatttgatcaaatttttcatctcttcatcgttgattatatctttattattgtataattctcattttctcatctcctttctcttgattttcattttgatctattaaaacccttcatctcttatttcttatttttaccattttaagcaatttctttatttctatatgatagtcattttatttttttatctatcttagagataaatactatttatatccatctatttccacttaacccttatttcaatcttatcatatacatcacttctttaaacaacaaataaacttatccttcacctaattaaatgtctgaagatttaaaaattcataaaactttaaatactataaggtcagttttatcaaatgatgcaacttccttacaagaagaaaatgatgaaaatgaattagctcatcttggttataaacaagaatttaatagaaattatggtttcctttcaactttttcatttgcattatcaatttctggtttaatgggtacaatttcaattacttacctttatccactttggtctggtggtcctgctgctgctatttggtgttggtttgttggtgcctgtggttgtctttgtattgcttggtctgttgctgaaattacctcctgtttcccaacttccggtgggatgtattatgttatcacacatgttgtccctaagaaacatgttccattgatttgttggattgatgcttggttatattttactggtgctcttacaggtacttgttcaactgattttggtgctgcaacctcttttaatgaatattattcaattatcaactgattattcttatactccttcaagaggtcaaataactgctgttacaattcttatattaattactcatggtgcaattaattcattacctggttcagttctttcaagtattactaaatattattgtattgttaatatttgtgcaactaattgctttaattgttacacttttagctaaatgtccatgattttaacactagaggttatacttttggtaaagtcattaattccactggttgggatgctgatggttgggctttcctctttcggatttcttgcaagtttcttgggtcatgacttgttatgatgcaacttcaagaatgtcagaggaagttcataatgcgtcttatttaactccattagcaattgcatctgcacttactacaactgctgttttaggttgggttttagttattgttattactctttgtatgggtactgatattgatagaatcttaaatactggtacaggtcaaccaattgtggaaatttattatattgcaatgggtaaacatggtgcaattgcattcctttcattagcatttgtcgttttatggttctgtggtgcagttgcaacttgttataccgctagatcattatgggcattctcgagagatagaggtttaccatattataaattttggtatcatttagatccacgtactcaagcaccagttagatgtgtttggttaattgttttcattggatgttgtctttcattaattaatttaggttcaacaactgcaatgaatgcaattttttcagcttgtgcaatttgtactgattggtcatatataattgttattgcagcatttgcattgaatagagaaaaaatgggtgttgcaagaggtccatttaatatgggtaaaatttcaaaatttgttatgttttatgcatgtctttggacagttttcgtttcaattgtctttgttttccctaattatatgcctgttacaaaggaaaatatgaattatacagttgttattttaggatttgttttcttttcagcaggtggatggtatgttattgatgcaaagaaatggtataaaggacctgtttcaacaattgatgaaggtgaaattgatagtgaattagaaatgaatcatgataataatcattataatattgaaattaagagtggtacagatgataataatagtagtaatttagttaaggatagatctaaaattcatgttgctgttgcaaatagtgatacagagtaaatttaatttaatttaatttactttattattaaataatttttatttttatattacattatacagtttaaattcgtttcttttagttataatcctactataattaagcataggggtctattgatctgaaattattgtacctcatcgttgttcagtaaggacatctcatctcatctcactagccacacaaaatacagaaaagtggcgcattgaaaaaaataaaataaagcatttacgtaatccgcaattactttcctaattaggcaggtacttttcttttcttttctcttataatattaatattacagccgcttactttaaattttcaaaaatacgaaagttctttcctaaataggcaagaagaatccagtggggaactttgggggggcaaattactgttaccagtagattatacacgttaagatagattagtatgataagaatactggtatataagtatagttgaattccctgttgatgttatctttatctattgactgttgtttatttattagttatgtagtttattttgagatactacatacaaacatcaaaccctcattttaatttaactctaaccctttcctttattatggtgtgactgttaaattaatttacttaattggtgtttacgtaatctatatttcaagccatgagcatgtgaaaaattgtcaattttggaaatttccattggttgaagtgacaataatcggtggaattctctggaaaaattgattttttttgatttttgttgagagattatattcatttgataagaatatttgataataaatcaattatcaatggttcaagttatatcttgttaaattcactgtatctttacgttactcatctcttttgtaaattagaataaaaaattaatttctttacattcacttctatatccaattgacaaaatactattattattattattagaaaatgatatctgtattaaataagttgaaaccttcttcaactactaaaagtactgctaatgatgaaaataatctagctaatttaggttataagcaagaattcagtagaagttatgacttcatgtcttcattctcatttgcattgtcaatttctggtttaatgggtacaatttcaattacttatctttatccactttggtctggtggtcctgctgctgctgtttggtgttggtttgttggtgcctgtggttgtctttgtattgcttggtctgttgctgaaattacttcctgtttcccaacttctggtgggatgtattatgttatcacacatgttgtccctaagaaacatgttccattgatttgttggattgatgcttggttatattttacaggtgcattgactggtacttgttcaactgattttggtgctgcaactcttttaatgaatattattcaattatcaactgattattcttatactccaactaaaggacatattacagctgttacaattcttatattaattactcatggtgcaattaattcattacctggttcaattcttgcaaatattactaaatattattgtattgttaatatttgtgcaactatagctttgattgtcactcttttagcaaaatgtcctgattttaacactagaggttatacttttggtaaagtcattaattctactggttgggatgctgatggttgggctttcctttttggatttttgcaagtttcatgggtcatgacttgttacgatgcaacttcaagaatgtcagaggaagcctataatgctgcatatttaactcctttagcaattgcttcagctcttacaacaactgctgttttaggttgggttttagttattgttattactctttgtatgggtactgatatggatagaatcttaaatactggtacaggtcaaccaattgtggaaatttattatattgcaatgggtaaacatggtgcaattgcattcctttcattagcatttgtcgttttatggttctgtggtgcagttgcaacttgttatactgctagatcattatgggcattctcaagagatagaggtttaccatattataaattttggtatcatttagatccacgtactcaagcaccagttagatgtgtttggttaattgttttcattggatgttgtctttcattaattaatttaggttcaaatattgcaatgaatgcagttttctcagcttgtgcaatttgtactgattggtcatatataattgttattgcagcatttgcattaaatagagaaaaaatgggtgttgcaagaggtcctttcaatatgggtagattttctaagttcattatgtttgcaggttgtgtttggactgtatttgtttcaattgttttcgttttccctaattatatgcctgttacaaaggaaaatatgaattatacagttgttattattggatttgttttctttgcagcatggtggttggtatgttattgatgcaaagaaatggtatactggaccagtttcaacaattgaagatgatgaaattgtttcctctggttcatattgaagatcaatctaatatttcatcagctaataaaggtagtgaaggtgattcaattaatgaaaatgatgatattataattgaagaaaaggcttgatcccattcgttattttatattattctagattttgtatatttatttttagttctataagtttttgctttattaataatacctctatgttatattcttttaatttacaatttaagggttgttttgtgttttaagcaatttaccatattttacagtttgaaataattttaattattaatttttaggttagtctttgagtacggaattctattattttactataaaattagggtttttctacaaaatgaagcactattctaataattcagatggcaattgacatcatatactttaatttcaacccataagatccattataaaaggtatataattgcagttgaaaacaggaaatagaatcacccacaacagtttaaaatgttgtccctccaaggagaatattatttaacccatgaacttactgggaggtgcccagtgaaaactttccagtaattccccatgagtgagggtagaaaattgaaatctcatgatttataccaatggaaactgaaattttaaagatagtggaagatagaagatttatatctttaaggacaatcaaagacttggagtatggtagaggttaatgagattgcagatgagataataggaactaactaattcacaattatcaataatttatccaattataataacattattattaattttattaggaggttatttaatgaataaacattcattaatttcatcgaatcgtaaatcatttataatttgtggtaatcaaggtgttggtaaaaccaatttacatcatttattaaccaagggtaaattaccaattttaacagttacaacattagaacctaaaagtgataattttttagttaatgaagaattaaaggataataaaatttttaaagatattgaaataattgatttcccatctaataagaaattgaaaaatttatatttaatgccatattttgatgataaattaaatgaaattcaaggtataatttatttaattgattcaagtaattttgattctaaaatttgtcatttagttgcagaggaattattagaaattttcactataactgaatcaaaacctaatggaattgatattttaatatttgctaataaggatgatttatttacaagtaaaaaagtaagtaaaattaaggaaatgttagaaattgaaattggtaaaatttatcgattaaaattacataatttaaacaaagttaataataataatgataaaattgatgataatgaagaatttgataatcttaatatggttatcaaggatggtaaatttcaatttcaattattagaaggtaatgttgatttccaacatggtaatatctttaaggataattggagtggaatcagtgattggctttatgaaaagattgtcaattagttaatgtactgtatatatcatatatcatagaaagagtaactgtttgtacattacgtaattttggtgatgtttatttatcgacatgaatcttctttagatactaggtaattaatcatatacctattagatatagacatatatgcaatcactaatatcgacagtatttagtgtgtcactgttactggctttccatataagtaattatcaattatgttgtaaatttctaagaccaattttattacctatattatttacaactaataaaactagattaacaaattcaattaataatggattaaatgaattaggtgaaatatataaaatacccaatgattcaattagattgatgagtttatcaaatgatgatagtattaataatagcttcaataaaaactattatctgaatataatatttgatttattaatttcattttcattacaattaattgagttattcctgattgatattttgaaaattggagattttaatataatacattttgattggtatattacactatctgtactgattatctcattaggttacattattccaagtttcctactatatttctggattttccaaatcaatgatattaatagaaatcatagtaatggtaaatattttttcaaatttggactttgtcttattatttggagtataatcacttattcagcatatattgttaccattagggaagaaattaatgggaattttatgcaaatttcattatatttactttcattatttggtatgggatgtttatcaattttaaatagtatgggttgtgtaattggttgttatgaaatttggaaattttataaaggttatgaaataattgaaattaataggaaagatattaaattatcaaaagaattgaaaattttatcaaatttaataagtaatgatactttaattgatgataaaattatttgggataaattacttttaattgattcattaattagagatttaaattataataaatttaataataagaatcgaatatttaaatttattagattttcaacatggttatattgtatttataaagttatttatgcaattattaaatttattcaattaattctgattacattaatatcacttacaaaattaatagatgagaagaatattactaataattataataatgatatttattatgatggtagtggagattttttatcaattactattgcaaaagtattatttattatatttaataagaatttaaataatttatcatatgatgaattattaaagaataattttgaatcaattgataaaatttcaatgattgttaatttaattttaacaattttattcttttcattctcatttcaaaatgttttacttacttttaagaatttgaaattattaggtaataagatattgattttaagtgatcatgaaattaattaaagaagtatcattcaatagagaagagaagagtttagataataataattaatattctggataatattaataaatcaatatatgaaataatttgcctatttgtatgtgaaataactggattatacgttgtttctactggattattattaaattcatcaaatatgccaattcatgttaaaaaattaattatgaatgaagaattttggattaatgaaaaattaaatattaatggtaaattattagatgttgaatttattaataattggtttgataaatggtttgcaattggatcaatttggacatttttaattatattaataattaattataatgaaatgtttggggatatttttattttccaaaataatattgatgaagaatttgtatagaaaatacatgtaaatatctactaactactaactagcttttccggatgacgaaccttggctgaagtcttaaaacacgtaaaactctacctaatcaaaaactatatagaaccaaatgtggtgtcaattgatgtgtcaaatgtgatggatgcaaaagttgaatcatttgtattttctttgttatcagcttcctgaacaagtctttcagtgacatttggacaaaccatgtttacaacatctctttttgcacgtcctgttctagtgctaaaacagaatctaaaatgtttcatgttagtagaaaaaacatcagctggtagatataaacctactttaccagaaaacgtctctccttgtgacttcattattgtcatggaaaaacaaactctaattgtaaattgttttctagtaaatttaactggcaacttagaattggctttatgacgaaaaagaagtcttgaaagatccacctcattgataatctttcataaacatcagacatacttggattatttagaaccaccggcaaacactgtctgaaatcacctgaaaagacaacaacacaaccaccaaaaggaacatttttctttttcccctcccttaacaagttatctactgaatagtttgataaataaacaaggtgtaagaaatgcaacaaattcagccattagcacagacaacatttaccgatgaaatcattcaaaatggtgttaaatctaaaaatattaaatccttatcaaaagacactaaaaaggaaaataaccacattaatgtctcccctccaacactgatttcatctgggtttttaacaggtgaaacttctgaatgggtcttatttgataatattccatcgatgaaggtgatgatgattcattgataaatgttgtacgtgatgataataaaattagtagcacatatatgaaattaagaaaaagaagaaatttttcaatgataaaactaaaatggctaaaacaattatagaaatttatcatttaaagaaagcaaatggtattcaagagataaataattctcaactataggaatttaaaagaatcttgtatacccagtaattggaaaaatatgatgttagataatttaatcaatacaaattatgataaaaataatattatctatagatgatataaagaataaaaataatgaaactaatgatattaaagatagaaatttttggcaaagagatgaaagtctatcaactcaaagtatcagtactggctcggatggtattggtaatttataaaaaagaatttgtactctgacttaatctatataatcctataactaaataaataaataaataaataaataaatataaataccctaaaacatctcatattttgatttttctcattccaccaactctatatctactaaaaataaagaaacatgtagccaaagtacatgttgcaccagcaaattctaccattgaattataaccaccttttgtctttgttaatgccataccaacaggtaaactaatcaaattacaaaatgaaataacaaaatatgcagttccataccttttaccaaaatcttttggttttgaaattgctgatgtacataatggtgttaatgcaaatgaacctgcaactgcaaatccaaaaataattgtaaatgccataaatgcacctaaatgtttaccaaatggtaaccataaaatccaaactgataatgacattatagctgacattaaaatcatcagattaaaattaccatatttatctgataaaaaagttggtataattctacctaaaacacctgctgcattgaaaactgttaatgcaattaatgatgtactctcagagaatcctttacttaatgcatatgatgggatatatgtactaaccattaaaagtgaaaattcatttaaaaataatgcacatgtaagtatcataaatgttaaatctttaaatgatttgaaatcaagtaaatcattaactttttctgtaaatgacattccactaccatcaccttcattcaatctttttattctattaatctctttatgtctatcatgagttaaaattgatccaattaataaaattgtaccaatacaaaatcctaaagttctcattgtccattcgaatccaacttgtgtatataatgatctacaaactaatggccaaataacaccaccaagtgatgcacctggcattgcaattgataatgctctacctctctttttattgaaaaaatgtccaatacttgtaacaaatggtgcagttaataatgaacaaccaattccacaaacaattccaaatgataaaataaattgataaatttttgttgaatttgcagttgccattaatccacatgttgttaaaaatgtacctattaaacataattttttaccaccatatttatcaaagataacacctgaaatcattgcaccaaacataacaaagaaggaaaatattgcaaaaatcattgaaactgcaatttcattatcattttttagcatatgagttgaaatatatgattcaattgcaccagttgaattccaaaggccaagttctccaactaatccaaggaaacatccagataatgttaaatatgccattttaccaccttctggatattcaacatgttcagttgttatattaacttctgtgccttctttagattttaaattattattaatatcctcaatatttgatgaatattcaatttctaaatccgattcggaatctgagttatttaaatttgaatcaatagatggacgtctttcataatgtgtgcttggcagggaatgtggtctgaatgagacaacatccgcagatacttcgtattcagcactattacgcattacactgtagatatgatgaacatcaaataaaacagtcgatgattattaacggcttcagacctgttcttttaagttgatataatacattttgttttttcgcttatcagttccttctaaatgcggtaataattccgagagggtgaatttaagcgagtaggagaccattagtagcagtgtattatgttatgttgtatggtgtatgatgataatataattgcctttacacttggaagttaagagggggaagacgtgattggtgtcagctagagagataaattcaatattgccaattgcgatatggtaagataagtctgatatatatattacaaaactgatataatggtattaataccaaagttttaatacaatttagtcattaattagataacttcaataggaaattcaaaggtttcagaatgtgattttttggtgataacggaaaatttaattttgtataatcttgcaaacatacatgtttgaaatgatgatactaaagcaaatggattagctgagataaagtctatgttgaatttaaatggaatttcattagtgtatctataagaatttgttttttcacaataaacccatttatcagttaaatcaatggttgtgcttgcaaatgtattacgaataacaaattcaatatatttggtactacctaacccttttaatgtttcaaacaaagttttagggactcttgaatcatacaatttcatcatatcgcatatcttgttgtaatatagaataaacttttcaaatttagttttgatggtttttggactattgagtaaaaatgatttgtcaatattgaatggtaacttatgaattgacgtaaagtctacaccaattaaatctggttttattgtaactgatgttggcaacttagaagatttggtcttgggaagaaattctagattaacatttaaagaaaatatttgattgttgcctgaagaataaattgaattatcaagagagttggttaataattttggcaaaaagctttgaatctttgttgatttatccattgaaatatgcatattcataacaccatcaatttttgaaaataaatcttttttgaactcaatactggtttcagatgagtaatcattacactttaatttttcatcagagtaagttggaatttcattagatgaactaaagatcgatttggatttaccatttgagctaaagataatctcatcttgttgtctaatatctgaaacaccaacttgatttaacatatttctttcagttaaaacttcgatttcttcgatagcttgcttttcatatctttcaatttgatcatttgttgtaccattagtaaaaacataatcttcaggatctggaggtgactttccaaccctaatagaatattccctatttctgataaaaatatagtcatattgatgtgtagtgtctttcttatagaaaggtttataagcttctaaacgagtaccaataagttgaaaattaatatagtaagaaacatattcaccatagaatgcaaaatcatttgcatgaattggagagccaggaacatcaagccaaccataacctagacttctattgattttaattgatgatgcagtatttgagaatgaagaaggattaagaccaaatgaaggaggtgttttcaagtgttcagtcaattgatgttcacaacaatcatctaagacataatgtggaattttaaatttgaaaaactttttaattggcttacttggatcaagtattcttttctcgaaaccaacataagtattatccaaagaatcataaacgtgataattatcattatcaccatcaaaacctaaaaagttaaaggaagcttcaagatcataagttgtcataatttttttcttataagttaagtttttatcagattgttttacaccaatttcacattccattgatactaaaagcatttcaagaggaatttgtttttctgaataattttcaaaaatgacaaatccataaaccatatcaccaggtaaataatgttttaatggagatctttgtttataaggttttccaacaagtggcatttcttcagttaatttaatagtaacagaaagaggtaaattaattttttgtaatttatttaaattattcaataataaagtacttgaatcatttaaactataatcaaaagaatcattttgagttggaacagttgacaaatcaattgattctgataaactttcatcatattcaggaggttcttgaataatactataaggatcaattaaagtacgattaaacatactattatgcatttgaaaggaaggtaaaatatcagttaaataatcttttccatcaatttttttctctgataaagatatatctttaattaattgactattagaatcatcaatgcagattattgtttcattgtcattaatatttgccatattaacagatctattgatattcaaatttggattcattattagttttccatagatttaaaaatggaaagcgttaaatttgcctttataaatgagtcagtttttaataagtcattgtgaattattgagagttggcgaataggcagtagttaacgttttaaaggaaatgattgcagtgagcaaattatcggaatttgactcttctgtaataaccatgctagaattaaccattatcatgaacctcgggccatacccaataaggtaacattagtggtcgatagtccaggatatgattggtaagggactatgaaccggtagtacctgattaggaaaggtaccggaggtatattgggttcatacctattatgtctaaatagaacaaggttgtaactcaattcaatatccgtaagtagctcttattctaacaataggatataagtgttaaactgttttatttctttctagaagtttctatcgaactatgattaattggatgtaatattcaagaagtctttcttcctagcaagagtatatgtaactttttctatattgatgtctttaaataattcctttagaatattgaaaaggttatgattcagatttatggaatttaattcttgattcataataacatacactctgacttcagtttgaaaatttccagtaataaaattgtaattgaaaggttaaaggtaaaatatcaaactggcagctgacgatttagatacatggggtggaaatatcaaactactgggtgattttaacctactcccagtggagtgacataactactgggcaacatgaaaataccaggaactgaaaattatcacctgtggttgaaaataaatctacttcggactgcccatgaagtactgggaaccctgaaattttactgcgcactgaatcaatataggttcaaacaacgaagttgaaatccttagagttatttttcatcattcaccttgtaaatcggtcccggtagagttcactaggaaataatttccgataagagtatgcttttttatgaacatcatgaaagctcaaggccaaactttaaatagcaaacgtcacccgacgtttttttatcctacttattagttatacattgtgggaaaatcgatagttttttactatggtgctgacctcaattattatttatataaaattaagtaaaagattgattaagagagatagagagatatataaaagagtaaactaaattttaaataaaaagaaagagcaaaaattataagaaattgaaatcaaaacttattatttatcattttcattaatttcacgatattcagtattaatttcatcagaatattttttattttgaatttcatcagaatatctaccacttgaaccattttcaccagattcaccttcctctacaccttctgcagcttcattttctaaaaattctctttcttgaactgataagttttgaacaactctttcttccatatttggaatatcagccataccataaataccaattgcaacacaacctaaaacacctgaaatacaagaaaatactaatgcaacaatacctctagcagtaaaaccagcaggtaatggtttaacttgaacattttcaccttgtaaattaaagaaatcttcagtattattagcagcattaccaacgaaaccaccacatgaggtacaaacatttttccaagtatcagataatggttcttcattttctctaataccaattggatcttcaattaatgtaagtgctaaaccttgaagtaaatgccattcaatatgacaatgaaagaaccaaacacctggattatttgctttaaatctaataacaaaatatgattgaggtctaacatagagaacatctctaaacattgattcatttcttggaatataaggagcagattcattataaggaattggaccatcttcatcactataatcaggacctctttcaacaacttggaaaacatgaccatgtaaatggaaaggatgaacaccagtatcattattattaagaacaatttcaacaatttcatctttttgtaagacaataccatgagtatttgaaccataaatttgagcatttaaagaatcggaatcattatttgctgataaaacagtacctaaagttggaatttttggagtaacataagtaatattattaaagaaagcataattaacaccattacctaaattatccataacaacatcaattgtaacttgatgatcataatgatcataattttcataatcatctaaaggagttaaccaaaaatcatctaagaaatcataatcatcaacaagatatgttttaggccaactatttccttcagcatatttaagagaattagtaacatttaataataaatcatcaggtacaatatctaacattgtatcatcaattttttgcataattgcaaaatctctatcagttgtatttttagttgtaactaagacatcatatctttgagcaacagtaatataaatcattgaagttgtatttggttcaacatagacaccatcaacagcaacaacagtcatatcatgatcttcaatccaaaaatattgagatacaaaaccaccaatattaataattctgaaaagataagtagtatttgattcaacattaatagttgcattcataaaaccattcattaataaattttgaggaattggttcagcaccagttggattatataaatcaaggaaactattagttaaagttgagatattatcatgataccattcagcaagtgctataattctttcatcactataatgatctttataaggatgatcaggatcttcaattataaaagtacctctcataccatccatatattgaccttgagtatgagaatgataccaaaatgaaccaacttgatcaggtactgtaaaattataagttaaagtttcacctggtgggatttgacattgagttaaacctgggacaccatcgaattgattagtagaatgttgaaataaaccatggaaatgaagtgaagtaattatcagtacctaaaccattatataaatcatataataattctatcaccttttttaactcttaaatcaggccaaggatattcaccattacaagcaattaaatcatcaacatctgctaaaccatcaggattacctgtaatataagttgcattccattggaaatgatgagtttctgcaaaggtagtaccaattaatgccaaaagggcagttgcaaatttcatccttgtcaaagaagaatagaagaatagaagaaagaacaaaccaacattaacgattgtgattaattgaagtaaaacggggggagagaagtttatttaaagtatcaagtatcaataccatagcataataatatataatatagcataataataagcataatacaattatataagaaacctattggataataacagtaataaagaccctcaccggtataaccgatatgtccttccttcactatataaaacacacgtataatcctctaactggtcttgttaacagtacatacagagctgttacgtatcatcttctcaactgccaactggtgcaatctactgcctctcttcatagcacctctcgctgatgtaccggccttgtcctcgtatttactaacatctaaccgtaattggccatcactgtctacctttacactgggaccaattataacacctgcatagttaacatcaagtccttgaatcgtatatacactaccaacttcatctatagtattacgtctttcactccatggtatcactgcaccgggggtaaatttatcccacattaatttaaatcctccactaccatgtacataccatttaccttgtaatctatatggttgatcatatgtagataacatacgacattgtccatatatttcatccttctccctaatcttatcatacatttcttgacaattatcaaatactttaaattcaaatgtcttaccatcatcatcctatatcaatacactctttagggatatggatatacttcgtttatgaaaacacatccttttaatccattcataaacttctaaactacctttaccctgcattctccattgttctcttaacttatattctttcactaattctacattaccttctaatatatcatttaatgatgtagatcctttaataccgccccaatattgatcggttcttaatgtttgctcttcatcatatacaattataataactttacatgtctttagaatctcactaagatgattatctcccataaatctcttatatgcattcttacatgttgctaataaatgtgcttcatcaataataactatatcattaagtcctttatgagtcttattaaatccattgatataacttgttggtctctcaatttcactcttattgatccattcaaatgatttaataactcgatgatataatcttatcatctctggatgattaacaagtaaataattccttgtatcttttaatacttccttatcaccgttcttactaatttgttgaatatcattaaataaactattcaaaacaacagatttacctgtacctgcacctcctcttataataaatactcttggtttatcaccttctttgtatactctttaataccattttcacaaaatttaattatatcatcctttaatgttatttgttcatttgataattcaacatgtgataatttatcaattgcatccttttctttaacacgtttcttgtacttgttaggatcaacagattctacctctacaacagttctcttaggtcttgtcattgctcaaaagaagaagtcttatacaaaatagtatataaaaagacttactttctaaactccgatgatttcaatatgaaaaatacacgttaatttttcatgtcaatatcaaaacatctatatacctttcattcaatttcttctaattcagcttaatatactacgtataatgacctcaaatacaggtcagaagacgtttacaccagcagaattacttatgacacgtaataaacctccaatacaatcaattactcccaatcaacttattcaaacacgtccttctaacccatcttcaatgaatgatttaaaaaaattattatcaggtaataaaccaattaaaaaatcattattagttactttaaaaatcccaaaacgttcattaattgtcaaatttaaatataaatcaattaataaatgtaaaccttcacaaattcaacatcctttctttaagcaaatttttaataaatttaataataaagattataataaggacaagaataaaagtattccttcaattaataatatttggtcatatcctagattatcttcatcggaattcaaagtaaggaatctgagtatagaagaagagaggctgtattctagtttaaactcagttgaattaccattaataatacgatctaaacctgttgttaatttagaaataaatgaaattgattatttgatatattatcaaggaatatcccacaatacacctaataatgataattattgccttactgtcgatgatgaaataattgatccaataaatacatttctttcattaagcaaactacagaaaaaagatattggtaaatacaataaatttttcaataatgaatatattcaaactacatcattaaataattattcacaatggtgtgatatttataaacctttaaatcatttagaaactttacaatcaactttcatatcaaatgatgttttcaattggattcaaaattcttttatgaaattaaaatcagttaataaggagaaaagaattgaaaaattagctaataaaaagaaaaaggtagatccttttataatatatgatgaagaatcagatgatgaagactttattgttccatcattaattattgaaggtccaattggttgtggtaaaacaagtatgatttattcaattgttaataatgaattaaatggatttgtatttgaatttaattcaagtaaatcaagagcaaggaaagatttagaatttacaattaaacaaattggtacaacttcgatggttagtaattcgacagataataatgaaaatacacttattttatttgatgatgttgatttaattgataatgaaatggataaagatttttggattggtttaaataatttattaacaatttcttatagacccgttgttttaattactaatgatttaaataaaatacctaaaaatatagttaatgaatcaacaattattaaatttaatgcaattagatgaaaaggaaattatttaaatatttaaaacttatttcattatcaaggaatattaatattgatgataaaatattgaaaaaatttgctaaacttagatttaaggaaggctctcatggaattacaaatgttttcatataatttccaattatcaaacgtgggtttgaataatataacattgattaaagaagagataaatgaggatgagaataatcttacaaatttaaggaaaacttgaattgaaatcgattaatgatgatttacaatactataatgatcaaattaacaaagataacgaaacgacacagaaccgatcaactgaagattttaatactctacgatattcctatactgaattttattcatctaaaattattctctaatggttcaagatcaaagaaatgtagatacaatgatggtaatcattataacagcaaacatccaacaaatattttccaaacactttcgcaggacaaactctctactgaagtattccccatcatcgacaccatggcagaaatggagactctacgcatagacagtgaactgccacgtagatttgatgcatatccaatagatatcttttgaatggtaaaattacccgcgttgcctaatggggaaattttccaatattactatgactcaattttccaaatttttcaccaatgacttctacaccgggtgttatcatgatataatagtatttctttaatttaagtttcatttgacagatagcaatgttagcatattccaactcattaagatctgtatctaccactgctagatcttcatctcgttgctttgcaacttcacttgatttagattcaatagtatctccaaaaggttatgaagctagaactccaccttatgcaaaattattgaaaaatttaaatcaagttaataaaataactaataatcaacctttaacattagctgaaaaaatcttatattcacatttagttaatccaaatgaaattgctaatgatattagagatattagaggtttacaatatttaaaattaaatcctgatagagttgcaatgcaagatgcatcagctcaaatggctttattacaatttataacattgtggtatgaaatcaactgctgtacctgcatcaattcattgtgatcatcttaattgttggtaaaaaatggtgctgaagaagatttaattaattcaatttcaacaaataaagaagttttcgaatttttaaaatcttgtggtgaaaaatttggtattcaattttggggtccaggttcaggtattattcatcaaattgtacttgaaaatttctcagtaccaggtttaatgatgctaggtactgattctcataccccaaatgctggtggtttaggttcaattgcaattggtgttggtggtgctgatgcagttgatgcattaactggtactccttgggaattaaaggctcctaaaattttaggtgttaaattaactggtaaattaaatggttggtcttcacctaaagatgttataactcatttagctggtaaattaactgttagaggtggtactgggtttattgttgaatatttcggtgatggtgttgaaaatttaagttgtactggtatggcaactatttgtaatatgggtgcagaaattggtgcaacaacttcaactttcccaatgcaaaatgctcatttacaatatttaaatgcaactggtagagaaccaattgctacagttagctaaattagttaatgataattatggtttcttaaaggctgatgaaggtgctcaatatgatcaagttattgaaattgatttaaataatttagaaccaagtgttaatggtccattcacacctgatttatcaactaaaatatcagatttgaaaaatgcaactgaaaagaataattggccaacggaaatttcagcaggtttaattggttcttgtactaattcatcatatcaagatatgactagagcaatttcaattattaaacaagctgaaaatgttggtttaaaacctaaaattccatttttcgttactccaggttcagaacaaattagagcaactatggaaaaagatggtttaattgatatatttgaaagaaataattcaattgttttagctaatgcttgtggtccttgtattggtcaatgggatagaggtattgatgctccaaagggtgaaaatgttattttcacttcatttaatagaaattttaaagctagaaatgatggtaatagaaacacaatgaattttttaacatcaccagatattgtaactgcaatgatttattcaggtaaaatggattttaatccattaaaagattcaattaaattatcctaatggtgaaaattttaaatttaatccaccaaatggtattgatttacccgaaaaatggattcgttaagggtagaaaagaattttatcctgaattagaaccaaagccaaaaagtgaaattgaaattaaaattgataatgaaagtgatagattagaattattagaaccttttgaaaaatggaatggtgaagaattgaaaacaactgtaattttaaaagttgaaggtaaatgtacaactgatcatatttcagctgctggtgcttggttaaaatataaaggtcatttatcaaatatttcaaataatacattaattggtgcagttaataaagaaactggtgaagttaatactgcttatgatttaaatggtgataaatattcaattcctgatttaatgatgaaatggaaaaatgaaaataaaccttggattgtcgttgctgaacataattatggtgaaggttcagctagagaacatgcagctttacaaccaagattccttggtggtaaaattattttaactaaatcatttgctagaattcatgaaactaatttaaagaaacaaggtatgttacctttaacttttgcaaatgaaaatgattatgataaattaagttcaggtgatgttttagaaactcttaatttaagagaaatgattgaaaaaaatggtgataatggtggtattattagaatgcaagttaccaaaaagaatggtgataaatttgttttcgattgtaaacatacaatgtccttagatcaagttaatttctttaaagctggttctgcaattaattttattggtgaatctaaaaaataattgctttttaaaattattcttttataaatttacattataaatacattctacatatagtatactttaaataatatacatttccattctattttgattgttcagtttctcttggttgaatcatgcaacttaatttccaacttctatcatcgtcccttgcattggtttgtttaactttccaaacttctaataatattaattcttgtaaaattggaactccattaatatcaaacatatcctcaaatgaaatttcatcattaatgttagtattatttttttcatcgttatctaaaaattgttttcttaaatttttaattgtctctgatctaacaatatctgtttctttattattatacacattacctaaatcacctgtatctttataagatatttgtaatgtttgtaaatcagaaataatctcagttattttactatatttatcaacgttaatcaattttgatcctaaaaatgatttatcattatttctataattcggattaccatcaacaataaatgttaaatcttgtaaaaataatgacaagtatggaacaataggtatatcaatattctcttgtgtattagtttgtaagaattctcttaacctttcacgataactattataatttctatttggatgaataattgatgctaagaaattaaaaagttccttatatttgtctgataacccatcccaaattctattaattcttgtaattaagaaactttgtaatgaagtcattattgatgctaatgaattaaaatttctcaaatataaacatgaaataccaatcttaagccaacatttaaatgcatgaattctttgatgcatttgtaaattaggttttaaaatactttcaatgacatattcacttaataaattagtaaataaaacagatttttgaatatttggtgataaatttaaatgtaatttctttgtagtgaaattttgattcaataattcaccgatttgaattgaacagaaaaatttactctcaattaatgttaattgtttagcaatttctaatccattgaaatttaataactgttaaatcatcatttaaaattttccaactctcttgtgatgcattccaccaacaatcaattaatgtcttagtatctaatggttcaaattcattttcaatatatcctttaaaccaatgtctacctaacattctacgatatgacataataatcaatttaatcattgaggtttgttgttttgttaataatactgtattcgccttagatttctttaattcaatatttaaacttaaattcaatgaaatccttgaattgtccgctattaatgtatcattacttagtttttcaagttcataagtttcaatgtcatccataaatgagttataagcttcaatttcattcaataaaccatttgaatttatacccagtgacattttagatattgtcttttgatgaagttttgatgaaatttttcttggcagtaattgtttactatttgaaatattattataataatttaatttatcgttattagattctgttggtggattaccaattaatttagatgcagttactaataattgataactttcaattggtaaaaattcttttgtaccttcattgaaaaaattaattaaaggtgctaataaaacataatctgattcaggtttccagtaactttctaaccaagtacggaaaaatttcataactaatttccttctacttctaatctttgtttctaacattgtattatcattatctattctcttatatgaattattaacatcaaatctattaattagtgcttctaataattgtgcactatcagagaaaattctaaatgttaagaaaaatgttgaaataaaaaaatatgttggtggattgatttcatctgtaagtaaatgaactaaagctctaaatgatgcaccaataactctattatccttttcacttctaatcaattctttttcaatatcaaattcatattcagctaaatatccatcgtcggtgttatcttgaaacttattgtttgataagaatgtattttcatcattatcagtatcaacacttgacaaaaattctaaaccagcagaacttaatttgagatcggttgaattgccagctttaaaaattgaaaatcttttacttgctctagttgtctcagctggattaatatttaaagttgattctcttttaaatttattaacctgttcttgtatatttgtatcatttgttattaatgcatttgtacattttttaataaaagtttcaggagatatactgatacttaaataatttggatatctcctactatttggtaaattgatcatatctttcaagttaaacaaattcttcattatataataaggcattggatgttaattcaatcattttagatgaacaaacaacaacagcacctgcttcatgtgaataaaaataaagtgatgattgattaggagtttgattattttgatttttcctattaaataaatcttttttagaaacatcatgtaaaatcctgatataagtatttaattcttcgaccatttgtcttaatttttcagtttgaaaatttaatgattttatttgcttttctaaattaagtgaatatgaacctttaggatattttttcatattatttgtaaacctcgtctcactttcttgttcattcattgttgttttcagcaaattaattatgaaaaaatattcattaaataataaattaatatgacctaagattagaccaacagttgaaaaacttttagggttatgttcaactaaatcaattctacccgatattaaacataaataggtaattaattgattataaacttcattaattctatatgaaagaataggtggcttgtcaagataggttatatccattttaactgattccatatcattccaagataattgatcaatttccgcttgtttattattattactagtactattattattttgaatattgttgatactattactattaatattatcttgttcaagaccccaaatatctaagaatgtaatagccttttgtaataaatggaaggtaagtaattgaaggtattcaattttagttgaagaaattgtacccatgtattctttaccctttgcaattaaatctgcccaacctcttaataatttctttctcatttttctaacaaccggtttattttgaacgacataattagatcttgaaatacaatcagtatcaactaataattttctaataccatcagttataccattaaaacattcaacatcaaatgtataaccacgtaaaacatcttcaattgaaacaggttttgattgaggattcaataagaatttacctgcatgttttaataataatttcaatggagctcttgtatttgctaattcctttgatttcatactatttaattcatttttagaaaatccagttacaacagttgaacggaaataattcattggaacccaacctctctttaatgatgatagaagtgttacttcaccccaacctgaatcatctaaattatatgtgaatgcaatttcatcttgatcaaaagataaacaaattgatgaatcattttcggattctaatgattctgcattgaaagcgtaaatagctgaaacaaataaggctgaagcatcctcatcttcaaattctaaactatcattatttattgatggagtaaatgaaagttccgaatttctttgaatgttttttgaatcatttttattttattttatttttatattgatcagagaaaagtgactgatttaataccgatactcttgtttttgttggactttcttcactaatacttttatgagttatgttggattgtttaaattcaagtggttcatcttcagcaactgattcgtatctattagtaaatgattgacgtggatgtttttgtttattattatgattaatattatcatttgttggattagtgttattagtattgttattgttatgtaaagcagggtttaaggatgaaattctaaaacttttcatacctttattcaaatcttgagttttcctatttggtaattctgaataaacacttgatgttgtactatagattctagaattttgtgatatacctaaatgagaagtttcaggtattgatctttgaggtaatgcagaataaacacttgatgtagtactttgaattctatcatttgaagtatttgaaagattatgaatatgattttcatcatttatattttcatccttcagaaattgggttggtacggaggaatttagaaatgaggaagtattatttgtataatctatatcattgtgaatatcactttcttcattaatttgaagtttctcaacagatgaggttagtttattgtttttatgagttgattcaagggtaccatttattatagtaggatcgtttttttcttcctctaaattgactgaacttgaatctgaatgtatttcaacaaattcatttaaatttctatgtttatttaaatcatcactacttaaaggttcccaattatttataactggtgataattttgaagttaaatatgagaaatctgctttagcgatgttagaatccacaattcgatcatcaatattatcattatcatgaattgaatgtgaagatttactaggattcaatcttaatggtgaagtttcaggtgaaacattaaaggaagtatttgtgactatttaatgaaaggttagttaatgttatgttagtattcttttttcaatttaaatcaaaatcatatatacatactgtcttccatgtgttagtataatagcaatgagatgtattctatgtattctatgtattctatgtagttaattatacaaaagcagctgagcttaaagaagagaggcactgtagagtttaaaaaaggggaaaaaaggggaattttcaaaataaacaccttaataaaaaaaaaagtttcaagacgcgttaataaccaattttgatacttcatttgacaaatattggcattcttcaacacttgctgcctctgcataaactctaactgcatcctctgtaccactaggtctaacgaatgatctgccattagtaactgtacttactaaatgatctatatctttttgaattggaggttcaactaatttcctttcagcatctgtagttataaatttattacgatcattaactataacttttgttaatttattaggtaaatcaatatacgtatttgaccattgtaattttgatttcttaagaattgataatgatacaattaccgctaataaatcactaattgcatcaccaactgtttgattgattaaatcatttaataataataatgatttaattgaaatattctcaggatgatcatttaatagggaaatcattatattatggaaattttcagaaataaaacagttccatgtccattagcttcaaaatatataccaatatcataattaagtgcttcatgatgtaaatgtttaacaccagttttagcacaaattgaaggtaaatttaattcattaatgataaaattagttgatgatccattagcatatgctgtttgaattataccaattgataatttattatgattatgattattttgtggtaattgattaattaatgatgatattaatgatgataataggattgcaattttatcaccatctaataaagtaaatttattattattattatcaataaaataacatactaatctatcagcatcaccatcaaatgatgcacataatgttgaatcattagatgcttcaatatgatcaatacctgaaggtaatttttgattagttttaacaaaatctgcaccacaattaacatttaaagaagatggaatatttgtttcatcattaattattttaaatttattagataatgaagaggaagtggactttaaaaataatttcagtttatcagcaccaacaccatttgcacaatcaacaattaaatttgtaatatcatttggtgaatgaccattaattgttaataattctataaaagaatttgataatttttcataataaccaatttcagttggtttaccaaatgatttatcattaaagcaacgtgtaatatagtgtaattgaggagttgttaattcattaaaatttttataatcaacaaatggagataaaatatcgaataattgagtacaaatatttaataatcttgaaccactctctcttgtatctcttgcaataactatacttgctttaatgtttggattcacaacatatttattccataatggttttaaataatctttaaatttttcaaaagtagtacaattagaaagttcagttactattggttcccaaatttgaggtaacatatcaccattgggatcaataattttaacaccattatcaattggaggattatgagatgcagttatcattataccaattgatttattattacatgagaatgaacgtaaaattgcaataattgaaactgaaatcataattgaatcaagtttggtggcatttaaacggaaacctgctgtaccatattggaaatttgcattagcaggtggaggatatttattgaaaattgatctaagtgaagattctgggaagttcattgataaagaagggtgtcttgattagaatgacatgacatgtcaacatgaaattcgaggatgtatagtaaaatgatatatttctttattaggaataggtcttttcctatatatacgacataaatggcaccatcattaccaatatatacacgtaaagagatagaagaacatactgggatagatataaataatttaaatgatgataatataggtaaaaattgtgaattaaaggaattaatacaaaatcaatgtacatatgatggtaataatgttaaatgtttaccatttaaaaggatttttttacaatgtttacaatataatggagataatgaaaagataattggatataaattacaaagtaagagaggattagagaatatacgagataataagagtcagtttaggaatattgagataactaagagggaggataatgtatatgatataaatgataatgaaataaatgaatttattaaagttgatgaagtatttcaaaggaagattaaagaatattataataaacagtaggtaggtattgaactaagtatttatatattatacattataaacttcattttcatttggttgaggtaattttttattagctggatcagccattaatttacgtaaatctaataataaaatttctattgaataattataattccaattttgtaaagttttaaattttgaaggtataatattaccattattattatcaacacaaggtaaattaattttagaaataaatttaattgttggaggttccaaggggtaattattaccaatatgaattttcaaatgaataaattcctattttcatgatttgaatttggaggaccaagtattgttgcattccaatttgacattgtaatatcatcaggatttgataaaccataagaacaagaatcaggacctaaccctttttcacctttctctaattcttccagtagtttaaaattacgtggtatctttgacattatgactatactaatattaatacttaatatctatactaatatccaatataaaccacctgtacttctccttactaacctggaatcctttataattatatcattaatgatcccctttttttaaataattccaataattacgtaatcacaaaataaaatagaatgatgacgtaatcaaaaagcacttcgacgcatcgtcccccgtaccgacccatcgacccctgtcttacataataaaaattttaaattatcggttccgagaaaacgttggaaaatcacaaaaatgagaaattccgccaatccgcgcctttacattgaatgaccctctcctaatctctgaaatctccatctgttgatataaatattcgattaaagtaccccccgttttggattcttttagataacttgtattctttatcttatcttttgaatttcttctcattaatcaataacaatgtctttaagaaatattgctaaatctgctactagagcttactcaactgctgaaccaactttaaaggaaagatttgctcaacttttaccaggttggcaagctgatgttaaagatttaaaatctaaatatggtaaaaccgttattggtgaagttttacttgaacaagcttatggtggtatgagaggtattaaaggtttagtttgggaaggttctgtcttagatccagttgaaggtattagatttagaggtcaaacaattccagatattcaaaaatctttaccaaaggctgaaggttcagaagaacctttacctgaagctttattttggttattattaactggtgaagtcccatctgttgctcaaactaaagcattctctgctgaattagcttcaagatcagaattaccaaaacatgttgttgatttattagatacttgtcctgcaactttacatccaatggctcaattaactattgcaattaatgctttagaaagtgaatctaaatttgctaaagcttatgctgatggtgttaataaaaaagaatattggaaatatacttatgaagattcaattgatttattagctaaattaccaaatgttgctgctaaaatttatagaaatgtcttcaaggatggtaaagttgctccagttgatttaaacttagattattctcataattttgctaatatgttaggttttggtgaaaataaagaatttgttgaattaatgagattatacctttcaattcattctgatcatgaaggtggtaatgtctctgctcatactactcatttagttggttcagctttatcatctccttacttatccttagctgctggtatgaatggtttagcaggtcctttacatggtagagctaatcaagaagttttagaatggttagttgcaatgaaggaagaattaggtgatgatattttcaataaagaaaaaattgctgaatatttatggaaaactcttaatgctggtagagttgttccaggttatggtcatgctgttttaagaaagactgatccaagatataccgctcaaagagaatttgctcaaaaacatatgccagattatgatatgttcaaattagtttctaacatttatgaagttgcaccaaaagttttaactgaacaaggtaaaactaagaatccatggccaaatgttgattctcattctggtattcttttacaatattatggtttaactcaacaatcttattacactgtcttattcggtgttgcaagagctttcggtgttttacctcaattaattattgatagaggtttaggtatggcaattgaaagaccaaaatctttctcaactgaaaaatatagagaattagttgaaaaaattaataataaagcttaaatttaattagttaagtattatttctttaatgtcatgacccttatttatttatttattccttaataacttatagtatatttatagtttgtttataatttattaaattatattatattccataaaaaatagaaaaagagaaaataattatcattatcattattcatcatcatttaggttaaaattaccgttataaccaattaaagaaaaaaataaacgttgcgagctatgtggatcgaacacatggcctccagatcttcagtctggcgctctcccactgagctaagcccgcttcggttgtgttttttgtgctttgttttgttccagctgtacttactcacgtgaccgatttttatatgagtattttgttaattttaagcagtattttaccatattttaactgaaattattaagtaataataccaagatgtagttgggtttagttttaagttaaaaatattaagaaaatgaagaatttttggaattattttttaatactttgaattaattattttaaaaaataaaaattgggttatagtttttgggaataaagtagcttttttacaaaaaataatgaaatgacagtttcaaaggtgatatggaatagtaatcacatagtggaccaagttaagttactaaaccgtcaacaaataaacggttttaaacaatttttacaattttctaattaatttttgactaaatagtaggtttgattttaataattcaatgtcatatttatactagttatatcttataacactatagatgaattaattgatgcctgttacaggccatatgcaaagaaagtaaacctttgatagaataaagtcatttcgcaatgaattttcatgttacttagatttaactatttcttctttcttcatttcacaatattaataaacaagcttataaccaatatgatccaatccaatacagtacattaaagaaagttttaactttaatagttataaaaaaaagccgttttcaaaataaacttaaattaaccaataatttccaatatattggtaattaaatttactgtatgggttaagtataaaattaattacattttatgatataaaaaggatgatatatctatgaaataagggtcgaatacatttattcaagatgataatacttattagacaataacaaatgactgcagttaaggataaaaatttaaagaaaagaaaggaaccaattccagttactttattatcaggatttttaggtagtggtaaaacaacattattagagaatatacttaaaaatgaacatggatttaaaattgctgtcattattaatgatatttcaagtttaaatattgatgcaagtttagttataaatcataaaattgttacaacaaatgaaaaaattattaaatttcaaaatggttgtatttgttgtactttaagaggtgatttattagaagaattaattaatattgttaaaaatgaagaattcaattatattataattgaaagtacaggtattggtgaaccaatgcaagttgctgaaacttttacacaagaattttctgaattattaattaattcagctgaaaatgatggtgaaaatgatggtgaagatgaaaatggtaatagttttaatgatcttaaattgttacaagaaattgttgatatgggtggattaaataaattagctagattggatacatgtgttacagttgttgatgcattaaatttttcaaatgatattgaaacaactgattatttagctgatagatggggttcaaaaaacaattcaatgaatgaagaggatagaactgttactgatttattagttgatcaaattgaatttgctgatgttattttaattaataaagcttcattagtttctaaaaatttattaaagaaagttaaaaaaattatttcaactttaaatccagttgctaaaatttatgttacaaattattctaaaattaaaaatgaattaattttaaatactaaattatttaattttactaaagcagttacgtcacctggttggttaagaagtttagatgaatcaaattcaaaattaggttatggtgatgatttaaataagaaaagaataactccaaaacctgaaactgaagaatatggtattaataattttgtttatagagctcgtaaacctttccatcctaaaaggttatatgatctattatgtgataaatttcaaataattgaaagagttggtatgcctgaagaagaagttggtggtgaagaagaagaggaggaagatgatgaagaaggtgaagatgaggaagaagaagaagaggaagaagatgacgatgaagaaggtgatgaagatgttctaactaaagaggaaatgttaaagaatagaaaaaattcaccactttgtaatgttgttcgttctaaaggttatttttggttagcaacaagatatattttacgtggtgaatggagttcagcaggttcaatgttaacacttaatgcaggtacaccatggtttggtgcaatgtcaaaagaattttggccaaaagataaagaaactatttcatcaattagattagatttccaaggagttcatgaagatagaagacaagaaattgttttcattggatttaagattaaaccatcaaaaattcaaaaattatttgatgaatgtttattaactgatgaagaatatattgaatataataaaattgcaagtcaaagagatttagttaaaattgagaaaactttatcaacaatgtatgaagatggatttgaagattgggattttattcaagaagatgatgatggtcataataaacattaattgaatttatatgaaaacattttcaaatccattaatatcaagtataatatcccaaggttcaccatattttgaatattttttccaattagtttccaaaaactttataatactcataattgaacctgactttttagtttcatcaaattctttaattctgtataaaatatatattgacgtttgtcattttcattaataactaatccacaaataacaaatgaccataaacataaacaactagcttgtgaatgtattgatatttttttaagattatcgtaaaaatcatttgaagcttcaataatatcataattgttcaatgaataagttggattaattattttctttaataaaatatatgatgctcttgcaatcatattacccatataacaactttccattaattgattttgaatatttttaggtaatgtaaacttaatagttgtaaacataactttcagttattgttttttcaaatgatatattcatttgataataaatcaactatttcattaagttcttgttgaaagagtgtaaattttcttaattctaaatcttcgccacaatgtttcaaatattttagttcattatcctacaggatcaaccaattaatgatgaaacaattaaaaataatgaatttcttattctatttttacattgaaatttttctcttaaacatgaaaccattaaacataacaagacctctttagaattttcaatacttttaatatcatttcaatacatttcttgattatcaattcttatagttttatcattactatcctttgttagccttattatatcttcttctttaacatttataaacttttttcttttgattttggttttagtaggttggaaattcttaggatttgtacctggtaaccatcattcacaaactaaagaagatttatcacaattggaacatgaaggttttgcttcattacattttagttttcttttccgacaacataaacaactagtggtgactcttttaaacttcttttttaccattttatttggtttttggtctaataaaactttaatctccataactattagtagtacaaggtgagtcaaaaaagttaagaaagaaataaataattgtaaattgtagtaaattgatttgacatgataagataagataagataagataagaaaatacgccggtgatacatctccgaagtattaactgtaataactattatgattacaactttatatacaagagaatgaaactatacacaagagaatgatagtagtaggagaatatacactactttttaggattaaaaacacctgagataatgatgaaagccaaaccaactaaacctttcaataaatacacggaataaccattaaataaagacataaatccatcaattttaataattttaaagatattttcatttgataaaatcattttaacacgtaaagtttcaagaggataagttaatgatgatgtaaaaacagtaataagccaattaaagataaaaaatgaaaggaatcctttgttttcaacataattagtgtaaattggtttaatgaattccattgctaaaataaatgtaagtctgtaaaggataatgcctaagatagaaggaatgaacccagtatataatgaaagataaaccatttgaattgtaaattgatttatagacactaataatacctttatattttaatggtaattctttattaatatttggaatatcagataatattttaacaataacaacatctaaagaataaatgaaaaacatattaacaataccacgtaatgaaccataaattattttataaaatgtatcaatccaataattaccggtaatgttttgaactggaacataaagatttgtaaaatatttaattatttgaaatataatagttctaacaagtcttggatattcacctttccaaagagaataaaaaccttcattatctctaactctttcaaatgcatcattaattccattgaatttattagcaattaaaccagaatgaagtaattgatcttgaccctgtaaaagtgttttaaccctgtttaagggaccttcaaatgatgattgaatagctctaatagctaagaatgtggcagttaatttgtagttcacaggttgttgttgatcagacattgtttaataaagaaagaagtgtacatatattatacaaaacatcacggtcacacattgttagaaaccttaattggtgaagattggaaacattttaagaaaagtaggtgtttatcggatatttatataaattgtgtttgttgatgatgttaatgtcggtaagaagtgtgtgtatacatggggaggggacagtagttgatattgatgatgatgttgattagtatagggtatatagtctacagataccattatagatgattcaccccacatggaacagatgttttaaatatgacactgaatcctccattgatggatggcaaattcacaactaatgctatatattagatgatatacataccacatgccactcattaatgtacctgtaggtgatgcaaaacctggtgaaactgctcctagaagaaattatttagttaaaaatggtgtcttaactaaaccaagaggttataaatgttcaactatttatgaatttttcaatgaatgtgttggtagacatggtaaaacttcactttgtcaaggttggagagatttaattaatattcatactgattgtaggaaaatagagaaaataattgataataaaattgaaattattgaaaagaaatggtattcttatgaaaaatcagattataaatatataacatttggtgaattacaatcaattgttaattattatggtaaaggtttaattaaaattggtattaatcattccaaaagggataaattacatatttatgcttcaacttcacctcattggatgagaactttccttgcttgtcaaactcaaaatattacaattgtaactgcctatgaatcattaggtcaagaaggtttagttcattcactttctcaaactaaatcttgtgcaattttcactgataataattattaggataacttaattataccattacaaaaagtttatcatattaaattcattattttaacaaaatgatatttcaaaattaaatcaattaacaattgataaaattaaatttttcagacctgatagttagtttctattcttataatgaaatatgtgcaaattggtaaaggaaatgatgaatttaattgatcatcatcctccaattgcaaaagatttagcttgtattatgtatacatctggttcaacaggtcccccaaaaggtgttgttttaacaaatgaaaatttaattgcaggtgttgcaggtatttcaaataatttaccaaatacattaataactaagaatgatagatcattagcttatttaccattagctcatatatttgaattaactattgaattagttaatttttattggggtgcaattgcaggttatgcaaatgttcaaactttaagtgaatagatcatgtaaaaattgttatggtgatattaaatcttttaaaccaacttttatggttggtgttgctgcagtttgggaaaatttgaaaactgatataatgtcaattgttgataatttgtcaatttcagatcaacaatcattttggtcttcatataatttaatttcaaattcaaatttaatttcaatttcaaatttaatttcaaattcaaatttaatttcaatttcaaatttaatttcaaattcaaatttaatttcaatttcaaatttaatttcaaattcaaattcaaattcttcttttccttcatcaataatgaataaaattaaaaatgatacaactggtggtaatttaaaatttttattaaatggaggttcacaaatttcaggtgaaactcaaagatttttatcaaattcaattgctccgatgttattaggttatggattaactgaaacttgtgcaaatggtacaatttcaattccaaaacattttgaatttgatgttgcaggtccattagtaggttcaattactgttaaattaattgatgtaccagatgcaggttattttgctaaaaataatcaaggtgaaattttaattaaaggtggaccagtttcaaatgaatattatcttaattcaaaggaaacaatgaaagcttttcaatatgaaaaaaggttggcttagtacaggtgatattggtgaatggactcctaatggttcattgaaaattattgatagaaagaaaaatttagttaaaactcttaatggtgaatatattgcattagagaaaattgaatcaatttatcgttcaaatccttatattttaaatatttgttgttatgcagatgaaaataaaacaaaaccaattggaattattttaccaaatgaattaaaattaaaggaaataattttcaaattaggtttaaataataagaataaattaattaatgatattgaaccatcaaattattatcaaaataaattattaattaatgaattacataaagaattaattaaaacaggtaaatatggtggtttaaaaggtattgaattaatttgtggtattataattgttgataatgattggacaccagaaggtggatttttaactgctgctagaaaattacagagaaagaatattttatcaagtgttaaagataaaattgaattagcttataatagtgacctgaaaagttatttataaatcaaagatttgttttaaactatatagctgtggatttgacaaataaagtatgtaaatttcttaaatatctaattaatatattagcgagtgtcaacggtgaagtttttcacttaattaaattcactgatttctttattaattaagaagttccacattataatcaaatgagtgacgttgatcaaggtactactactaatactagaactggtgttgatgacaatggtgaaattttaattgatggtgtttctttcagtaaggaaagaatgttgtcattatacaagaaatttttgaatatttataatgatggtttaataaagttaaaaaaactaggtattgatcttgatactgttgaatctgtttcaagtcttggtatttccaagtataaggttcaaaatgatgcattttacaattgttttgataagaatactgtttatattaaaaaatacaagaaatttagtactggtaatcctgttcttatggagaaaactttcaaaatcattacagacatgtcttctgcaatgttattgctgttgcatttttcttcagctggtacttacagattatctgaaatatgtcatttttatatggataataatggaactgttatgaaattatatcaacctgatgatgggaaggcttatttatatattgtttctgattattctaaaaaagttcttattgttaactgatgaagttaccaagtattttattcactttattttagcattctacccattgaaggcatgatgcagtgaaagacttaccattagattcttcagttaatgatcctagtcgcattttgaatgatatagaacttagttttgatgatgattttcaaggggtaattgaatcttctggtttaattactgcaaaggattgtttaaataaatttgtttttacggttcctcgtttgaagagtaatgattactatgctagtaggatggttacacctattttgaaagaattattaaaagttgatgaaagtggtaaacccataacaatttcaagtttgagacaagcacttgttcattacagaaatgaatgaggcgaataatgcattcaaaaaattccaaagagtctttttttaggttctgattatgatgaacgtataagtcttgaaaatcaagttgtctttgcaaatgtttctaatattgaaaggacatcaagcttttcctcttttgttttccgtcatggaaagactgaatcagaatttaggttttattacaaaagtatattaaactttctatcaatgtaaacactgaaattacattaacagcaaactgtttagtatttatatgattatatgtttaacactaagtgatggttataattctttgtgtcatggtcttgtataattaattatataaaaacgattttggtagtatataaatcaacaatatttatttgcttgattgtattgaaaatcttcattaaattgcaaaaaccatcatttacgcttttcttaaaaatctgtactttattcatttataatattaaattttaataaaaaagttatcatatatatataattatagaaaagcaaattattatagatctaaaaaagcaaaaattattctgtagtttccaaataccattccatggtatactttctgaaagacttacctctccaatacattataataaagagccactaatcaccaaacaaaagcatgctaacataatagtggttcccaaaacaccaacaccatctaaccagtattggaaaacccaagtgaaaactgtagcaaataaatttctaacaaataacactgaagtcattgtatcatttggctgttttggataacattctaacacataagtcaatgacaatgaagtgatactacataatccaattgaaattaagtccaataccaattgcaccaacaacccatgaagcaccatataatggacccaaaccgtacattaataatccaccaacatttaatactacgggaattgaaatcatcaataaacgaaattctggttcaaaaataccatcgtttcttttagtcatataaatttggaaagaatcagagaatgatgaatataaacctccaatgagtgtacctgcaaccattgctagatttaaaagacctaatgtatctggtgagaaattgtatggtggtgccatgaaagaattgagcttgtgtgacagtaattaaagataaccaacaaatttgaataccataaacaactgatgcccataaaactgctggatatcttattacaaataatgttttaataatactgaatggagaaagtttgatatcattgagccgtgaaatggatataatctttgtaaataagtttttggttcattctatttgttcagcagaatcaatcttgtcactatcactatatggtgcttcatttacaattacttgagatttttcattggaaagtaataagttttgatcagtagtatttgtatgactatgcattgttctatttgacttcacaacttggagtaacttttcatcaagttcaaaagtatcttcagcttttcttgtaaagtaggattcttcaaggaagaaaaattgaacaactaataaaccaaagcaaataataattgagatatatccacaccactaaataacctaagtctgaggtgatataacctgctaaaaatggaccgaatgcaggaacctaaacctaaagttaaagtgtaaattccaatgaaacttaccatgatcgtgcaaaaagaaaatatcagcaattgaaacttcaaccattgaatcaataggaccaacagcaattccagccataacggagtatccaataaatccagaataagtggtgcgtgtaacaaaaataatgcaggcaataattataaatattgaagaaagtagatagattggtcttctaccaatcttgcaagaaactggttggcatagcaagcaactaaaggctaaaaatagaaaagttcaatcctttacctgtattcaacttgtttaaagatgcatcataaacctcggcaagcaaggtgtagataggaccacaaaaatttgaacatgctgcaagaatcatggaaaaaaagaatagaataataaagtgtaacattttcgaaagtaagaccaatttaatggatcatttggacttttagatggttgaggaatcaaaatgatatcggaatcttttttgttggaaattcctaaaccttcaatttcgtgttgttctccaaccaaaaccgtggttcctggaatggtaagatcatcttttaatgatttgtcttctgttagaaacattgtttttcttttttcttgattgtttgttttttgatttgtcagaaatacatgagaattaacacagttcaaaggtatttacaaagttgaaaaagttgttgcttttaaataaacaaagtttttcaacagcagtagtgatgataaggaataaagatagctgctatcatatctttatctgataagagtattcgatggagatagaaataaatcaatttaacgcttccgaactcaatgtgaaaaaaagtttaaattgaaagacgtttctttttctattttgcgcagccgctactgataagaaaattgattttcccgattgggtctgataagggtctgataaggtctgataaggttattttaggcgcttgcgttattctttagattagcagctttaaaatgttcaacttactttattaatatttaaatgaacaaggctatctattaacagaaaaaaacattttgcatctgtaagtgtaaaaaagataacagcaatccaatgacaattacaacagattgggaaactgcagctaaaaacaagaagaaagaggtttcatccaacattccacatgaatggttacttcctactgatttacttgaaaaatacaatgaaacaacatctgtttctgttttagatttgccaaaaaaactcatgtctaatgaagaatttgaaattacagaaaattacactgctttggaattgttggaaaagcttaagagttcagaaatctcagctgttgaggttattgatgctttctctcatagagcagcaattgctactcaagttacaaattgttgtactgaacttatgtttgagtatggtaaaaaaagagctgagtttttagacaattatttaaaagaaaataataaaccatatggaccacttcatggtttaccaatctcattaaaggatagtttcaatattcctggttatgattccacgttgggatttgtttcaaaaatcaacaacaaaccaccaaataagagtgacttggttaaacaattggaaaacttgggtgctgttttctatgtgaaaactaatattccacaaactttaatgactgctgactcggagaataacatttttggtagaactctgaacccaaataatttaacattgacagcaggtggtagcagtggtggtgaaggtgcattgattaagatgaggggttcaattttaggaattggtactgatattgcaggttctataagaatcccagcgttgtgtaatggtgtctatgggtacagaccaacttctaaaagatgggcaatgggtaatcaaatgactttatcaagagaagtctttgttgctgttgagccagttgcaggacctttggctgcagatttggaaacaatttcatttttaactgagattatttacaatgataaatcatggaggtatgactcaaacaatttgagaattgcttatcaggatccaaaaattaagtctggtgataaattatctgttggtattgttatggaagatcctgatttaccagttcatccaccaattaaaagaatcatcgaagaagttgctgatattttatcttcaaaaggacataccattgaatttgtcactgaatttccatcttttgacagagcatgggaacttggatggtcgtctttccaaagcgacccaaagtcaacagcaattgaaaacttaacatgtactggtgaaaaatttattaaatcactttgcttaccaggaatggatgtatatggaaaaggtccaactgatattgatgaacttataaaacttaaaactgaaatcaacaagtatatgaaagaatggacacagatttacaataaatatgatgttataatttctccaggctctccaggtactgcaccacctcatgatacatatggtattgcaccatataccaccatgttgaacatctttaaattttcctagtgtcattattccatttggtaaggttgatccttctgttgataaaaccgatttaagtactgtttaccctgaaaaattgaaacatatttatgcacactattcgttagatacttacaaggaaggtcctggtcatattcaagtatcagcacctcatcttgaagatgaaaaacttcttgcatgttgctcaataattgatcaagctctgaaaaaatgacctttgtttaaaataagagactttttatatcgtttttacctaatactttttcatttatctaaattaaattttacttattttacttaaactatttaaatcaaatccatcagttcaaaaaatttgactaacaatcatttcattttctaccatctctaaacctttattttgattccatgctaattttaagttatctatagctcgcaaatttccgacattatgtgtaatttcccactttttttccaaataattcacaattttgtcttgatcaattttgttttccaaagttaaaccaatgataaatattccccataacttaaaaattccattttccatatcagactcgttcaaactattgaaaactaaaaagaacaattccttaagtccatctttttcaattttgcttgcaattgggaagacatctaaaagtaacattttgcaacctattagtgttatgtagatcattttttggcttgatttaatttcttgtttcaacaaatcattaaccgccagcaccaatgttgaatagaattcgttatcgtaagactttttcctgaataaaaatgatgttttagccacaataggtaaaacatcaagtgtttcacctaataataagtttgactctgtagttgctttatctgggaaatatgatctcaaaatgtcacatagaatgaacggatgatatttatttaaaagctccaatggtgttataagtattgaaactgaataatggtagaataaactttcaattaacaaccttattgtttttgatgactcgatgtaatttttactaagtatgagttcaatccctgtgtaaatatatttcaacaactcttcattgtttgagctcatgtattttttaatcaaaatactaaatatgattgaatgtaatatccattcaaatgaatcactcttattaaacgatctaagaatctgtgtcattgcctttttatgaatttcattaataacctcatgtttggaactgtcaacactaaaaagatatgcagctgataatgatgttaaaatatctctaaattctgtacttttttgaaaagtttctaatgttagttcagagatgacttgtaatgattcttttggaacgagtgatttaatagttaaattaaaaaatatgttgaaaaaatgatcatttaaaggtgataatgctaaattttcactcattataaccatctgactattgtttcctaaaacatctaaaacctcttgttcttcttttactaaattttgttgtattatatcactttttgcagttttgaaaacgcactgtatttgtttgccaacacatctattgcattgtggcttattttcatcgcattttttctttgctttgctacaagcaatgcatccatttctagatcttcttttagtctttaaagttacctgttccaaaatttcaacccctttatcatttatgaattgatttacagattgtttggcagcaccccaaacacattgaatatttttcttggcacataactgacatactggtttagtttcatcacactttttccttgataatctgcaagaaatacaccctgacttagttcttttgattttttcctgtgattttggcattgttatggtatatattcaacattatgagaaacgttaacgttaatatattgataagttttgttcaatgttcgatgcttatctcaacccaatcacaaattttttttgttattacgtaatcacgaattatctaacatgaattatcaatagttttccaattgattcaagaattctgaaccaagatttgctattttagtatatttagctgtgggtttgagaaaaaaagtatctgtaaatttatataatcctgagttacttaaatatgatattaaaactatcaaagaatatgttgcaggggagaagagcaataacttgagtcaaggaaaatatcagtgctattttaaaaagattaagtaataaatcatctttcgtaaattccatctagaacaaggatttaggtgctgaaaatcttaatataaagtttattgaaaagtatgatttatagagtggagacacagttttgaaaatatagaagtaactttttgcaattagtgattaagttctcaaagccatttgaagataaagcaaactgtgtcttattttgactttaaaatatggtaaaataaatattctttgttaagggttataaaaaatgtttataaaatattaaataaaatcaataagattctttatcttgttttgctctcaaatcataaacatttagggcttcttctgcagctttgacaccagataaaaccattgcaccaaaagttggccccattctattagaagaatcacattcactcaattccataccagcaacaatcaaacctggaaaaacttctctagtattcttcacgattgaatcttcagctaaattcatgtctaaacaacccatttgatttcttttaatgtaaccttggctaactaatctcttgacacaaaaagcacccattggaccatcatgtcctgtacatgaaataattaatttggaattaatagtgtttggatccatacatgattgatcatcatgatgcattgaaactaaagtccaattagtaacaacaccagcaactctaataccaccttctgatgtttttctagtaatcaaatcttcaacacaagttgcattgaaaagtttaacatttggtaattctaaaacttttgaacataatatatgcagcagtcaaacctgaagatccggcaccaacaataacaatgtcagattcagcatatttatctaaatcagcaaagtatctttttgtcattgcacgggaaacttgtgattctctaattggagcaaatttgaaagagtcccaatcgtaaactgcatcagtggcagttgctacttttgattcatcattgaaaacatttgcagttttcatagtgattggagtttgcgtaattgttgttgtagtactcctttaaaaaaataataggtatatatatttttaatgttagtgatttgttctctatgttggaaagttttgaaaagcacatacattttgttttgtgttgttttgttttgttttatgaagtattagaagtattagttaaataccaaaaataatttaagatgaaagcatgcctatttataataaaagtatttagattttacttcttagctattttggcgaaagaatcaaaaggctagatagttttgaatttgaaaatgctacatttctatcaataaatccaaggtgtctagacacttacattattagtgcaattatggtttaatcaattaaggtaaaagagtggttattcagaaaaaggtataaaataaataaataaatacaccccggagaaagcaaagttcattttttctattgttaaaatgcgatgattaggagatgactcacccgttgagacatttttcaatcattttgcacccctacaactatattttttcttgaagcacatgtgcaacaacgatctgaggcaatattactacaatataattagcataaatctaaactaagtataagttcactttaactttaactttttccttcttctttgttgtcacttttcacaaaactccgaagtattaaaaatcactcaaatctcgtgatttaaagccacgccatttgtaagattttactatatagttctatttgtagtgaatagtgtaagaatttgtacgtggttttgccatatagctctaaattacgtatctgaattatgtagttcaatacaatattttacaatttgacaaaaaaagcaccaaaaaaagcattgaaagaacatttgaaattgactcaatgttacaatttgtggtgctgttataataatgattcaattaagatgagcccggacattgcaggttctcttattttcaaattgatagccacatgtacccgtgtctaaccgaaagagtcctcaatgccgcaaatcttttgaaatgttacatcttttcacaaaatagcttcttttgatctatttcagagtttactcaatgtttgctattgtttcgatggccaggagcaatccactagtatcactttaaaaagagacatctgtcaccgactatatagtgcctttcattattctatatcttattacacagtaacaacaagaatgacaaccgcaaagcaacaacaaaaatcaactgaaaagattacattttccttaaactggggtccagcaccttaccatattccaatttatcttgctcaaactcaaggttactttaaagaggaaggattggacattgctattttagaaccttccaatccatcagatgttaccgagttaattggctctggtaagattgacatgggattgaaagcaatgattcatactttagctgctaaggcaagaggttatcctgttacttctgttggttcattacttgatgagccatttaccggggttttatacttaaagtcaagtggtattaccaacgattttgaaactatcaagggtaaaactattggttatgttggtgaatttggtaaaatccaattagatgaattatgtaaatatcatggtttaacaaagaatgattatactgctgttagatgtggtatgaatgttgctaaatatattttagaaggtaagattgatggtggtattggtattgaatgtatgcaacaggttgaattagaacaatattgtaaagctaatggtcttgatgaaactgatgttcaaatgatgagaattgataaagttgcttgtcttggttgttgctgtttttgttctatctgttacatttgtaacgatgaatttttatcaaagaatgaaagtaaggttaaggcatttttaagagctattaagaaagcaactgatgatgttatcaatgatccaaagggttcttggaataaatatgttgattttaaacctcaattagataacgaattatcttacaaacaatacgaaagatgttatgcttatttctctgcatctttatttaatgttcatagagattggaacaaggttactaactatggtaaaagacttgatattttaccagctgattacaaaccaaactattcaaataattacgttccaggtgttgaacctaaggaagttgatgatccacttgaagctcaaagattgatggcaattcatcaagaaaatgttagaaagaatggtggattttctagattagaaatttagattatcaagattgttatttaattttataattagttattgtgtttaacctcatttttatcttcatcaattatatttcataaaaggactcacataaaagtaaaattgtttttgagaataaatcatttgaagtatatgcagtattagaagtggtatcgatgtctagcatggtaaacatgtggtgttttcgtatataagtggttgaaagctgtactagttaaatgtcttatattaactataaaagttacgtaatacagttggtggctcaacttctctttgtagtggaagttcacctaataaatacttggactatttccaatattatttgtgttctgtaaaaactggatattttaattgtttaacagtgagtcttgttttaaacgagtttctagttgaaagactgaaaattgatgtgtttttgaagaatgattaccaattatttaaaagatttgttgattgttggagacaatcgtaaaaaattcagggttcctagtctaagataagcttttatttttttcagaaatcaaattgaccttcaggaagccaatgaaactttcttatctcatcataaagttattgcttctgaatttggtcataatcaaattacccatgttgaaaactatgctgtggtggagaatgtgtctaatattgaaagaagtcaagctttccatatttcctttaatattatgcagaggctgaatcaaaatctatgttttacaaaaacacataaacattgatcttatttttaataatttagtatggccatttggcagttgggttgttttaatttttctttagtattttaattaccaaggtttgttatttgaaacatgctgaattcacaaaagtaagttgagttgaaaaggattaagaactgatgatgttagaacaatttgaagttgaaactattaatgtgtaaatttacttagtctttagtttttcaactttaagcttcagaatatgaaagatgcactctctaatatttttttatagtataattgatctacttgttacttgattagcagtaatggtgttaatttaatcaaacttaagagaaaaagaagtgttaataaaattgttaagtaaattgcctacatgaattctcactattaagaaatttctacatagtaattcttaccatagtaaattagtgttaaattaacagttttaatggatgttgtttatggcttatacacagaatatatacttctagttagttagtttcttatagaaagggcactagagattatgaatatcaaaatagaatgttcaaattgtttttattgatatcgttattgaaagcttgtttctccccatagtaaattagtatgtcaatctgacaatttttctgttgatttcttccttatcatctgtttcttttatatgttgtatgtttgatcatttccaatatgtgaagccaggtttcattgaaaaatatctcttattgaaaaagttatgagaattcaaagttaattttcttcattttttgtaatttgatattcaatgttagaaacaatgattgtaacttcaaaataatttgctgttgtataatttgcatgttctgataagtaatatgtaaaccattttgttaaatattgaaaactgataagattattacacttttcatttttgtaaattagtattgcagctgtatcgacttatcaaccacgcagccgtttagctcagttggcgcactcgttggtttgtatatattttctaatcactatgtattaaatgtcatttaaaaagaccttttattgataaagttatgccactttgtaattttattttttgaaattttaaaattagttttttattacttgttctaatgattttaagtttgtgctaattagatttttgtattagtacattgcaatgattaagaataagtaagttatttagattaacatttaaaactgatggacttatttcactttcaattttcaaaaattagtatgggaacgtgcaaaatgtcaacggcacatctttttgaccaagtttaagcacttatttatctattacctctttctgatagttgcgtattaagtttcatttcaaaagacccagtaataatgaaattatggcaattcaaaaattaaaaattgaaaatttctaattgactttttaatagttgaactaatgattttaccttcatggtagtgaaattttgtatcatttgcatgttctaatgaacatttgataaaccacttcaatagatgttcaaaactgatgaagtaaagttggtgttcattcttaaaatttactatggccatttagcaattaaatattatcatgtccagtttaagaaactgtttactagatttagttaattagaagtttttgatttcaataaagcaagtagaagttggtttgattaacaagtgatgtagttattaaaggtcaaagttagcattgttaatatactcattttctatctcctttgtttctcaactttaagcttccattcaacttgtgagtggtttaaatgatgttccttgtggtgttataagtctacttgtcatcaatatatgtcttttagtgtcagtttaatcaaactcaaaggaaaaagaggtgttggttaaattgctaattaaattgcctacatgaattctcactgtaattttttctcatagtaattcttaccatagtaaattattgttaaattggttctttcaagtgacaattatatgtgttatattgaagctttttaacttgaacaaagcgctttcttacactacttgtattggagaggatgaatatgtaaatagattgttgaaattaattgtttaaaaattagaattttaagtttatttcaccatagtaatttagtatgttatatcaactttcttttctattaatggcttatttaatgtaactataattttaaattgttaatctatattacaaatggaccttcagtaatgatatctgattttttaaaaataattacaaacttattacaatgtagtttattaattgttactttgtcattctttaaaatcactgtttttcactttttaggtggctcgtcattttataaatgttgctatatctcctttaattaagctcttttttccattctttaagctagatgttgatattcattactattagtatcatatatatgcttattatcattcaaaaagccttcatataacgatatatcaacaatagtagatgaaactcttaatatatgacataccccatgttgtcttaatatcctcaccatagtaatttttcacatagtaaatttagtatggtaaattaacagttttaatggatgttatttagggcttatatacaggatatacagttctagctagtaagattattatacaatgtctattgaagaatcagaatatgtaattactttgtccaaattatttgtttgaaagatcaaatcttcaactcacttcactaaatcaattcaattatcaatgtctttgtaataacctgcaactgttctcgtttgtttatttagtctttcctaaggtgtagtggtgattattattaaaaaagaccttgtattggtaaagttatgatgttttgaagttcaatttttgactattttctaattaactttttaatagttgtattgatgattttaaactcaggttaattaaatgttgtatgattagtgtgtaataaagaagaattagtaaactgtgttaaataatattgcaaactaatgagttaatttctctttccatttcctaaatttattatggggaatctatcatcatatcaaccacacatccgtttggttcagttataacacatgtttgtttgtttgttcataaaaacgatttaatgttaactttcatttaaaaagaccttctattgatgatattataccaatttgaaaataattttttttaaattttctaacagaatttttatcagttctaacagcgatatcatatttgtgctaaccagacgttgtattagaatctttcaataatggcaaatagccaaaccaactcaaactatattcaaaactgaatgaataaagtctttcttactatttataatttagtatggcaatttagcagttaaattgttttaatttcttttctgtattttaattatcaatagtttgtcatttaaaacatgctgaactcataaaagtaagttgtgatgaaaaacattaagaactggtgaagttagaactggttgaagttggcaacaaaatatgagtattttctaacccctctgtttttcaacattaagctttaaactaagtcagagataaatttttggcatctatttatggtgtaataaatctaattgtcattagaacatgtcaattagtagtagtttaaacagatttaaggaaagaagaagtgttgatagttatcaaacatttggcctacatgaatttcctcactattaagaaattttacttgtaattcttatatcttagtaaaataagtgttaatttaagtgctttgattgatgttatttaaggcctatacataagatatatatttctagttaattaaagtgctatataaaatctgttaaaggactcaattgagtaaataaattgactaatttgttaatgaagttttatgaaagtattataatctgattttatgtttgaaaccagatgatagttataaaacctgatagtagttaccgtattttcggagtattgtaactaagtcttatattaatgaataattagattgttaataaatgacttttgatgtgtttcattttgaagattttgggattttaaatattccatataatgcttattattctgtagaatttttttaaaggttcaagattcaaacctttctgaaagtgaaagatgtgttctaggtatagtgtttaacatatgttattgttatcatattaaaagcacattagacaaaacttagtaagataaaatttaattgaaactaacgcaagtttgaaatagtatatttgaattattttcaataaacaattatcaatcacactagcaaaataatacattgatgaaccattatttcttcttccaaccggatttgcagatatttcttcaattcatttaacttgaggctttccaatcaatgaatcagtaaatatttgatatttatttggcggtttaaatttaatagtaaatgattcactaacttcaattttagatagacactgaaatttaaataatcaattgtgaaacagtttaaaaaatatggtacaattattggtatgatgtactttttatagtaatgaataaagcaagcagatgttaatattttattaattgatgcaatctatatcataaataaaaaacccaatctaattttagtgaataagaatgaaaatttaaaggatgaattgttcaagtcagtatgctagatgaagttttggtaggtgaacaatgtaaattggttgatggaaagttagataatgaattttcatgatggtcttaattaataactaataaattgaaccatttaaagataaacaagtgtgaagctatttgataaataataaaacctcatgataccagagttaataaatttgactgatatattattccacgagattattgattatcatatggatcataaatgatatatcttttcaattcgtccacaaagaaagagttgtcaataaaacagttaattaaaatttattaagagaacttgtgaagtattgagagttagcgaataggcagtagctaacagtttaagtgaaaagttttcacttatgaaattatttataatgtaactctatataatccttttatagagtatccgatctcagtactctttaaagatttacagtctcgtagctgacaaaaatgaatatgtcggatttatcaccaattcaattgattattgaaaaacagaaggaagtaaaagctgagataacttctggcggaagatatgaatgtactttattaccattcgaagtacaatctcatgaaaacctgaaattaatttatggagctttgaaaactaatgctccaattaagaagtccaaacacaaggaaccaaaagattccaaagactccagtgatgaagatgaagatgccatgttcttcactgatgaagaagaagaagatatcaactatgtaaatggtatttttgaaaacaattgtatagaatatgtatacaatttaaccacatcaccttactctgatgactgtgaactactattagacacaggagcatcatgtcatgtaattggcaatagaaagttattacaaaatatccgtccatgtaatgcaaaaattagatacttacaaggtgaaacaacagttaaagaacagggagatttagttataggtaatgtaactattaaaggtctactatatgtgaaaggaaagagaaatattatcagttttagtagattaatagaaaataaatatatcacctggaaaggatcaggaaatcaaataaaatttcgtttcaagaataaattgatgctattagctatcagagatccaagaaaagactttttctttttacaaaatgcaaataaaaataacaaaactcactacgttttgaatatagaagatataaatttaaatgatatcattatgaaagtacatcaagcttctggtcatgttgctgcagatatgacacagttacaattattacaatcaagaaatttaaacattaaattagaaaacataaaagaagtacttaaagactgcaaatgtcgtgaaacaatattaaataaaaaccatggtacgaaaaagatcaacaaaactaaatacagagttggtgaaattattcacatagatacaattggtaaaataggtctaggatatgcggttatagcatcagatagagcaactaaaatgacattctctaagcttatagctcacaaatcagatgtcaccgatgcagcaataaccatcttaaaacaaatgcaaaatattttatcactaagaaaactaaatatatgtagcgttagagctgataacgaatatgatacaaagaaatttaaagcctatgctgatgaaaatggtatcataactgaattcactgcaccttactcatcatatcaaaatggtacagctgaaaataaaaatagacaaatgcaagaattaattagaaaattattacaaacagcgggattacatccaaaatactgggcttatgctctacaacatgcaaattttttgtataataatatccaaataagaaagaatggacactcagcatatgaaaattttacaaataaaactagtaatattgatgcaggttttgaaccacctacttttggatgcaaaatgattgcttataaccataataatgttcaaaaggtcttcaaagaacatcatgcaggtatatttatgggatttagacaaactgttaaaaatgcactaatgttattaccaagtgggaagattgttgttacatcttcattccgtgtatttccagatatatatccaatgcaaaagaaggataatgaaaaactatatgataatattttcgaaacatttcgtccaaatcaaagtgaatttgaagattattatccatcgataactccaccaggtccacataatccaccaggaggttcaggaggttcaggaggtcttggaagcacaaatgattattctaaaggaaagaaaaatgttaataaaaagaaaaatagagaacctacaattgaaagtgtaccagatgagagtcaactaactaccgcaactaatgatataatcatgacagatgcaccaaactcttcatcgatgattccagagagtagaagaattgaaacctcacatgaacaagagtttattccagaagatagaagaatcgaagctctacatgaaagagatattattccagaaaatagacgaatcgaagctctacatgaaagagatattattccagaaaatagaagaattgaggctccacatgagaaagaaacagtgccagaatcaaaaatcatcagtcaacaaaaaactgtatcgtcaaagaatggtaaaagaacaactaccaaaaataagaaatcaaaaattaagaaactaactctaaaattaggtaaaaaggaagatagtaatacaacaactgaacagtcaagtaaaccagcagagattaccaataccaaaccatccaatattgaacctcaaatagaatcaagcaaagaattagttaaatttaagacagctgaggtagaatcaagtaaagaattagttaaatttaagccagctgaggtagaatcaagtaaagaattagttaaatttcagccagttgaagaagaatcagataatgaagaattttatgatgcacaagacctagatcacgatcatcagaatcaagtaggtagtactccagaagatgattttcttaccaaaatggcagagttatatgaaaattacaaagaaatcaagaagttctacaaaacagacgaagcatatctagaagcaactcatcatagacagtattataatccagatgataaaccaatcccatctacaaacttaatagatgatagaccaaaagaatactggaaacaagatggtaaagtaagagaacaacttggactaccaactaagccaatgaaagcaccaaatttaagagtagataaaagaattcttgatccatttatggaagttcaagcgagaaaaatggactcagatttgaaaaataaatttgcatctgagggggagaaaagtatggaagatatagaaaagattaacaaaaagagaaataatgagagttatttattagttgcagataacaaatatactattccaaataatgttaatgaagtcctagagtcaaatgaaaaggaacaatggctgcaagcaatgaaagcagagttagatgcatttaaagaatttggtgtttatgaaaaagtgaaaattaaagatataacagcaccactgattaaaggtcgctgggtttatagtgttaaagatgaattaaacgtaccagatatatttaaatcaagattagtagcaaaaggatttacacaagaagtaggacaaaactatttagatacatattcacctgtgataaatggtgaaacaattagattcttattagctctagcagcaatcaatggatgggaaatacatcaactagatgctaagaacgccttcctaaacggaaagctagaaaatgaaatttactttaaaccaccaccaatgtgtaagacaaagaaggatgaagcatggttattgaaaaaggccatatatggtttgaaaaatgcacctttaattttctataagacattttctgaaacattaattaagtgtggattcactgtatcaaaaattaacccatgtttaatatatcatgaaaagttagaagtctatgtggcactatatgtcgatgatctactagttgttgggagttcaataaagaatattaataaagcaaaggatataattaaatcaaaatttgtaatgaaggacatgggagaacctaaaatgtttttaggaatgaatattaaaagagttaacaaaaatcatattaaaatttcaatgaaaagtactcttgaaagaatccaacaaagccacggtgtcaaggttccaatgagaaaaataaagacaccactggcaaaaggttttgatagatttgatgaaaaatctgaaaagcttaatgaagaagaacaccataagtatagaagcctaattggaaaattgttacatattgcaaacaatgtaagattagatattagctttgctgtaagtattttgtcaagacacttacaaacaccaagaaagtgtcacttagcagcagcacaaagagtcttacaatatttaattcaaacaaagaacaaaggtatccatttcaccaaatataaatacaagaaaatgaaatctatagactacagagtagtatcttcaaataagaaacagattatatttgattatggtaagaaaagggactatgagataagagcagtaactgacgctagttatggaaacgaagaaaacaagaaatcacagtatggatatattgttatgttaaacgacaatgtgatatcatgggcatcaaagaaacaaagctcaatttctttatcaacagctgaagccgaatatgtaggaatgtcagaagctgctaaaactactttatactttagaaatctcataaaagaattaaatatgaaaaccggaccaggtgtgatatgttctgataatatagcagctcttcaaatgagtgcaattagaacaataagtagtaaaactaaacatatagagataagattctatcacatccaagactgtgtcaagaaaagaaaattaaaattggaatatgtcaatacaacagaaaatattgcagatggtttaaccaaaattctagatggtagtactaactctaaattaaataaacttatattctccaatcataaagaaacatagagagagaattcagtttatgggggagtgtgaagtattgagagttagcgaataggcagtagctaacagtttaagtgaaaagttttcacttatgaaattatttataatgtaactctatataatccttttatagagtatccgatctcagtactctttaaagaacttccctcacattgtaaatatttttcaacatgttaattgcagagatttcttttactgaatattggttcttttattaacaactggttaaatacgtttattattaagtgtaatgaagtgtgatcaataaaagtgatgttgctaatgtaggcttccaaagatatgatttgaattgatgtgatattactcatatttattggaattaatatgatactatcaaatgaatatgtgattaaaccattgggagattaatagcacaaatttaataacataaatcccaatattacatataactgattattaaaaatgaaaaatgaaaactattcaaaaatgaaacgaatgtattagctatataatgtgaagttaaattatccaaatctcttattagtgtttatattgaggattatgttagttcatcatcgagtccaagccagataataaaacaataccggaatatatcaataaattgagatgcatctagtaaagtaatattggggcacacgaataaaatgatatacaaaaaagacacatcgattattaatggaatataagtaatgaaattttttatttaagtgatttgtctggcaatgaacccattacttacaacaaaaataacaacaacaacaacaataatagtaatgataatttatatagctaaaagaaagcatttagtctattaaatttaccaatatgcagtttttgttatatttactaaaaatacatgctctttttgttcaatactaaatgattctatttttgaaattcaagtttaaacattacttaaaattcagtagatttagtatgtgttattttcattttaattattgattaatatgacttaatatatccaactattaacttagatatagtaatattgagataataaacaacaacatccaataatactgaatattattataaaaaacaatgatttacatgatattatttctgttttatttccaatacactaatacagttaagcagtttgaggtttagcataaaggaatatttaatcaagtatctaggttcaaatgaataaaaactgatacaattaatagttaagttatgtaaacataaattataatatatgtactcattcccatttataaatgtaataagttaccaactgaaacaatattcaatagattgaagtatatctgaagcactaacaactaataatagatcagtattaacaaacattaatagtaatagtttactctttattctgtgtgatccaaaacattttgaaaaaaccctcgctttttcggctaaatgtttattttttattttggatgacaatcacttttcgggtaattttggttttcggataatgttttgaatttttatttttttaacttcttcgcatgagtgatgactatagcggaaatacatgttgtacatatgacgattagccgaatattctatttcatttattaacatggcattttttaagtttcaatgtattcatcttattccatagtcatttatattaagatagatacagttagtgattccttttagtgtatgtattgttttattattgagtaaacatatccactaacgttatatggcatttaagaaaagactaagaaagtcagcgaattggcaaaaaaaatttcccaaatttgtatgaggatgccaagtcgcattgccaagtcgcattttctgacaggtgccaaatggcgtgtttcatgcgacttggccagatattgctgtagagtagttagatggtagttagatggttggttgtaatggggttgatgggtagatgaaaactgtctacttcattagtctctaagtggtctggttgtcgagatatagacccctaagtacgtagaggaggggggtgtagtttagtatgcagaagggttgtttcttgtagttagatacatggatatgttctcctgtgtctgtttagtagtagtagtgtctaagatagtgaacatgtggtgtgttcgtagagttacaggtggttcaatattatactagttaaatgtcttatcttaggataatttactatggaaatttgaaaaaattattataaaagttacgtaatctagttagttgctcaacttctctttgtagtggcaagttaagatgataggaagatggaccatgtgtaatggtattggtgttctgtaagagtagggtgtgtttgtctggatgttgtgagtgttcaacagtgggtcttgtttcaaaagagtttgtagttgttgagttagaacaatttaaagtggcaaaagttgggtttttctaattaactttcaagtagttgtactaatgattttagattcttgttaattagatgttgtattagtaagtgttttttattggaattatgcaaactgttttgtaaaagatttgaaattgataaagttatttcagtttcagtttttgaaatttagtatggcaattttagcaacatatcaacatcacatccgtttgactcagttgaaccactcgtttgtttgttcgtgtttgctgatgatttctgtgtaggattcatttggaaagacttcgtattggtaaagttatgccaatttaaaattgaaatttttagtattttcaaattgactttttaatagttgtattaatgattttagtttcttgttgattagatgttgcatcagaaagtattcctaattgcaaattaataaaccatttgatttaatattaaaaactgatgaagtcatttctgtttctgtttttgaaatttagtatggtaatttagcaattaaattattttatatctagttttggcaacagtttattatgtttagttaattaaagctttctgatttcaatgtagtaaatagaagtcaaaatggttaacaaatgatgaagttagaactgtttgaagttgatcatgtatgaaagtgcattttctaactcgttggtttttcaactttaagcttcaaactatatcagtggtgcattatttgatgtttgttatggtataatgagtctacttgtcatcaatatatgtctaatagtgtcagtttaattaaacttaagggaaaaagaagtgttaataaaattgttaagtaaattgcctacatgaattctcactattaagaaatttctacatagtaattcttaccatagtaaattagtgttagtgaagtagtgaagtaggtcgcagggggggtatagtgaagtagatcgcagggggtatagtgaagtagtgaagtagatgtgaagtagatcgcagggggggtatagtgaagtaggtcgcagggggggtatagtgaagtagtgaagtaggtcgcagggggggtatagtgaagtaggtcgcagggggggtatagtgaagtaggtcgcaggggggtatagtgaagtagatgtgaagtagtgaagtaggtcgcagggggggtatagtgaagtagagaagtgaagtagtgaagtagtgaagtagatgtgaagtagatcgcagggggggtatagtgaagtaggtcgcagggggggggtatagtgaagtagatcgcaggggggtatagtgaagtaggtcgcaggggggtatagtgaagtaggtcgcagggggggtatagtgaagtaggtcgcaggggtgtagtgaagtaggtcgcagggggggtatagtgaagtaggtcgcagggggggtatagtgaagtaggtcgcaggggggggtatagtgaagtaggtcgcaggggggtatagtgaagtaggtcgcaggggggtatagtgaagtaggtcgcaggggggtatagtgaagtaggtcgcagggggggtatagtgaagtaggtcgcagggggggtatagtgaagtaggtcgcagggggggggtatagtgaagtagatcgcaggggggtatagtgaagtaggtcgcaggggggtatagtgaagtaggtcgcagggggggtatagtgaagtaggtcgcaggggggtatagtgaagtaggtcgcaggggggggggtatagtgaagtaggtcgcagggggggtatagtgaagtaggtcgcagggggggtatagtgaagtaggtcgcagggggggtatagtgaagtaggtcgcaggggggtatagtgaagtaggtcgcaggggggtatagtgaagtaggtggcagggggggtatagtgaagtaggtcgcaggggggtatagtgaagtaggtcgcagggggggtatagtgaagtaggtcgcagggggggggtatagtgaagtaggtcgcagggggggggtatagtgaagtaggtcgcagggggggtatagtgaagtaggtcgcagggggggtatagtgaagtaggtcgcaggggggggtatagtgaagtaggtcgcagggggggtatagtgaagtaggtcgcaggggggtatagtgaagtaggtcgcaggggggtatagtgaagtaggtcgcaggggggggtatagtgaagtaggtcgcaggggggtatagtgaagtaggtcgcagggggggtatagtgaagtaggtcgcagggggggggtatagtgaagtaggtcgcaggggggggtatagtgaagtaggtcgcaggggggggggtatagtgaagtaggtcgcagggggggtatagtgaagtaggtcgcagggggggtatagtgaagtaggtcgcagggggggtatagtgaagtaggtcgcagggggggtatagtgaagtaggtcgcagggggggtatagtgaagtaggtcgcaggggggttaatagtgaagt
